United States Patent Application Publication US 2023/0033866 A1 - sequence listing, part 2

SEQ ID NO: 20874 - RNA, 20 nt, Artificial Sequence
  targeting sequence with TTCN PAM
ccacucucuaagguagguac

SEQ ID NO: 20875 - RNA, 20 nt, Artificial Sequence
  targeting sequence with TTCN PAM
ucuauuuuauguaugaggaa

SEQ ID NO: 20876 - RNA, 20 nt, Artificial Sequence
  targeting sequence with TTCN PAM
ucauacauaaaauagaggaa

SEQ ID NO: 20877 - RNA, 20 nt, Artificial Sequence
  targeting sequence with TTCN PAM
guuuccucauacauaaaaua

SEQ ID NO: 20878 - RNA, 20 nt, Artificial Sequence
  targeting sequence with TTCN PAM
accccucacugugugacgcu

SEQ ID NO: 20879 - RNA, 20 nt, Artificial Sequence
  targeting sequence with TTCN PAM
agcucaggucuuccucacuc

SEQ ID NO: 20880 - RNA, 20 nt, Artificial Sequence
  targeting sequence with TTCN PAM
ucacuccaacgucaacgcuc

SEQ ID NO: 20881 - RNA, 20 nt, Artificial Sequence
  targeting sequence with TTCN PAM
uuauguuacagacguggcaa

SEQ ID NO: 20882 - RNA, 20 nt, Artificial Sequence
  targeting sequence with TTCN PAM
acacuaggaauuguauguuu

SEQ ID NO: 20883 - RNA, 20 nt, Artificial Sequence
  targeting sequence with TTCN PAM
uaguguugaagaugcaaaua

SEQ ID NO: 20884 - RNA, 20 nt, Artificial Sequence
  targeting sequence with TTCN PAM
cuaggaauagucuuguauuc

SEQ ID NO: 20885 - RNA, 20 nt, Artificial Sequence
  targeting sequence with TTCN PAM
uagggaaaacauacaauucc

SEQ ID NO: 20886 - RNA, 20 nt, Artificial Sequence
  targeting sequence with TTCN PAM
guaccccauuuuucuugaaa

SEQ ID NO: 20887 - RNA, 20 nt, Artificial Sequence
  targeting sequence with TTCN PAM
ugaaacacagccguaucagu

SEQ ID NO: 20888 - RNA, 20 nt, Artificial Sequence
  targeting sequence with TTCN PAM
agaaaaaugggguacagaau

SEQ ID NO: 20889 - RNA, 20 nt, Artificial Sequence
  targeting sequence with TTCN PAM
cugauacggcuguguuucaa

SEQ ID NO: 20890 - RNA, 20 nt, Artificial Sequence
  targeting sequence with TTCN PAM
uuuguacuuuuaauagagau

SEQ ID NO: 20891 - RNA, 20 nt, Artificial Sequence
  targeting sequence with TTCN PAM
guugccagcuaucaucagcu

SEQ ID NO: 20892 - RNA, 20 nt, Artificial Sequence
  targeting sequence with TTCN PAM
augucagaguaauagagugu

SEQ ID NO: 20893 - RNA, 20 nt, Artificial Sequence
  targeting sequence with TTCN PAM
ugcauggugguaauuggcag

SEQ ID NO: 20894 - RNA, 20 nt, Artificial Sequence
  targeting sequence with TTCN PAM
uguuuuuaccagaagcuagg

SEQ ID NO: 20895 - RNA, 20 nt, Artificial Sequence
  targeting sequence with TTCN PAM
gguaaaaacaggaagagcug

SEQ ID NO: 20896 - RNA, 20 nt, Artificial Sequence
  targeting sequence with TTCN PAM
uagcuucugguaaaaacagg

SEQ ID NO: 20897 - RNA, 20 nt, Artificial Sequence
  targeting sequence with TTCN PAM
cauaaaaacccagauuccua

SEQ ID NO: 20898 - RNA, 20 nt, Artificial Sequence
  targeting sequence with TTCN PAM
gaguggaugcuaacauuuaa

SEQ ID NO: 20899 - RNA, 20 nt, Artificial Sequence
  targeting sequence with TTCN PAM
gccagcaaauguuuuauuug

SEQ ID NO: 20900 - RNA, 20 nt, Artificial Sequence
  targeting sequence with TTCN PAM
accccuggcacagaauuuug

SEQ ID NO: 20901 - RNA, 20 nt, Artificial Sequence
  targeting sequence with TTCN PAM
gugccagggguugaaaacag

SEQ ID NO: 20902 - RNA, 20 nt, Artificial Sequence
  targeting sequence with TTCN PAM
uuucucucuugugguacuuc

SEQ ID NO: 20903 - RNA, 20 nt, Artificial Sequence
  targeting sequence with TTCN PAM
cucuugugguacuuccagag

SEQ ID NO: 20904 - RNA, 20 nt, Artificial Sequence
  targeting sequence with TTCN PAM
agagucuguugagcauaaga

SEQ ID NO: 20905 - RNA, 20 nt, Artificial Sequence
  targeting sequence with TTCN PAM
gaagucuaauaaacccguua

SEQ ID NO: 20906 - RNA, 20 nt, Artificial Sequence
  targeting sequence with TTCN PAM
gaauuaaacagauuuaaaaa

SEQ ID NO: 20907 - RNA, 20 nt, Artificial Sequence
  targeting sequence with TTCN PAM
aaauuauucuagagacaggu

SEQ ID NO: 20908 - RNA, 20 nt, Artificial Sequence
  targeting sequence with TTCN PAM
agagacaggucagugguugu

SEQ ID NO: 20909 - RNA, 20 nt, Artificial Sequence
  targeting sequence with TTCN PAM
uuuuauauauaucuaguauu

SEQ ID NO: 20910 - RNA, 20 nt, Artificial Sequence
  targeting sequence with TTCN PAM
uacgugaaugaaugaugaau

SEQ ID NO: 20911 - RNA, 20 nt, Artificial Sequence
  targeting sequence with TTCN PAM
cguaugaauacaucuaccca

SEQ ID NO: 20912 - RNA, 20 nt, Artificial Sequence
  targeting sequence with TTCN PAM
uucacguaugaauacaucua

SEQ ID NO: 20913 - RNA, 20 nt, Artificial Sequence
  targeting sequence with TTCN PAM
ucauucauucacguaugaau

SEQ ID NO: 20914 - RNA, 20 nt, Artificial Sequence
  targeting sequence with TTCN PAM
gguuuuuggcccauuacaga

SEQ ID NO: 20915 - RNA, 20 nt, Artificial Sequence
  targeting sequence with TTCN PAM
auagaccaucaauccugaug

SEQ ID NO: 20916 - RNA, 20 nt, Artificial Sequence
  targeting sequence with TTCN PAM
gggcuaucagcugguauauc

SEQ ID NO: 20917 - RNA, 20 nt, Artificial Sequence
  targeting sequence with TTCN PAM
uucugggcuaucagcuggua

SEQ ID NO: 20918 - RNA, 20 nt, Artificial Sequence
  targeting sequence with TTCN PAM
acugucuuuuuuuuuuuugu

SEQ ID NO: 20919 - RNA, 20 nt, Artificial Sequence
  targeting sequence with TTCN PAM
auuuuaaccuucacauagca

SEQ ID NO: 20920 - RNA, 20 nt, Artificial Sequence
  targeting sequence with TTCN PAM
cauagcagcaggaacucugu

SEQ ID NO: 20921 - RNA, 20 nt, Artificial Sequence
  targeting sequence with TTCN PAM
ugcugcuaugugaagguuaa

SEQ ID NO: 20922 - RNA, 20 nt, Artificial Sequence
  targeting sequence with TTCN PAM
cauaaaccuagagugauucc

SEQ ID NO: 20923 - RNA, 20 nt, Artificial Sequence
  targeting sequence with TTCN PAM
caauuacuuuccaugucaag

SEQ ID NO: 20924 - RNA, 20 nt, Artificial Sequence
  targeting sequence with TTCN PAM
augucaagucgugcauuuug

SEQ ID NO: 20925 - RNA, 20 nt, Artificial Sequence
  targeting sequence with TTCN PAM
gcucaaccuaaaaguauaaa

SEQ ID NO: 20926 - RNA, 20 nt, Artificial Sequence
  targeting sequence with TTCN PAM
acccgaagauccuucccaaa

SEQ ID NO: 20927 - RNA, 20 nt, Artificial Sequence
  targeting sequence with TTCN PAM
gguagaaaaauagaguuuuc

SEQ ID NO: 20928 - RNA, 20 nt, Artificial Sequence
  targeting sequence with TTCN PAM
caaaugcucccuuauucuau

SEQ ID NO: 20929 - RNA, 20 nt, Artificial Sequence
  targeting sequence with TTCN PAM
augaacucccuaguuuucuc

SEQ ID NO: 20930 - RNA, 20 nt, Artificial Sequence
  targeting sequence with TTCN PAM
uagaauaagggagcauuugg

SEQ ID NO: 20931 - RNA, 20 nt, Artificial Sequence
  targeting sequence with TTCN PAM
ccuuuaaaugcacagcucca

SEQ ID NO: 20932 - RNA, 20 nt, Artificial Sequence
  targeting sequence with TTCN PAM
ucucaaccaggaugucuuau

SEQ ID NO: 20933 - RNA, 20 nt, Artificial Sequence
  targeting sequence with TTCN PAM
aaucaggcuagcaucugcug

SEQ ID NO: 20934 - RNA, 20 nt, Artificial Sequence
  targeting sequence with TTCN PAM
aaccucacauguuguagaga

SEQ ID NO: 20935 - RNA, 20 nt, Artificial Sequence
  targeting sequence with TTCN PAM
ucucauuuaaagaugaagaa

SEQ ID NO: 20936 - RNA, 20 nt, Artificial Sequence
  targeting sequence with TTCN PAM
ucuuuaaaugagaugaaaau

SEQ ID NO: 20937 - RNA, 20 nt, Artificial Sequence
  targeting sequence with TTCN PAM
ucaucuuuaaaugagaugaa

SEQ ID NO: 20938 - RNA, 20 nt, Artificial Sequence
  targeting sequence with TTCN PAM
ucuguaucucugcaauggaa

SEQ ID NO: 20939 - RNA, 20 nt, Artificial Sequence
  targeting sequence with TTCN PAM
aauucugaguuucuggugau

SEQ ID NO: 20940 - RNA, 20 nt, Artificial Sequence
  targeting sequence with TTCN PAM
gaguuucuggugauuucaua

SEQ ID NO: 20941 - RNA, 20 nt, Artificial Sequence
  targeting sequence with TTCN PAM
ggugauuucauaauuauauu

SEQ ID NO: 20942 - RNA, 20 nt, Artificial Sequence
  targeting sequence with TTCN PAM
uaauuauauuuauuacaugu

SEQ ID NO: 20943 - RNA, 20 nt, Artificial Sequence
  targeting sequence with TTCN PAM
uaaaauauaucauauauguc

SEQ ID NO: 20944 - RNA, 20 nt, Artificial Sequence
  targeting sequence with TTCN PAM
agauauucagagaaaaugaa

SEQ ID NO: 20945 - RNA, 20 nt, Artificial Sequence
  targeting sequence with TTCN PAM
gagaaaaugaauuuuuauau

SEQ ID NO: 20946 - RNA, 20 nt, Artificial Sequence
  targeting sequence with TTCN PAM
cugaauaucuugaaauuugc

SEQ ID NO: 20947 - RNA, 20 nt, Artificial Sequence
  targeting sequence with TTCN PAM
uuuucucugaauaucuugaa

SEQ ID NO: 20948 - RNA, 20 nt, Artificial Sequence
  targeting sequence with TTCN PAM
ucuuagauauaaaaauucau

SEQ ID NO: 20949 - RNA, 20 nt, Artificial Sequence
  targeting sequence with TTCN PAM
uccucuuagauauaaaaauu

SEQ ID NO: 20950 - RNA, 20 nt, Artificial Sequence
  targeting sequence with TTCN PAM
ggcuuggcucaaaugagaca

SEQ ID NO: 20951 - RNA, 20 nt, Artificial Sequence
  targeting sequence with TTCN PAM
gaaaugauuuugugauaauu

SEQ ID NO: 20952 - RNA, 20 nt, Artificial Sequence
  targeting sequence with TTCN PAM
gaaugucucauuugagccaa

SEQ ID NO: 20953 - RNA, 20 nt, Artificial Sequence
  targeting sequence with TTCN PAM
acccaaaaugacccuuauga

SEQ ID NO: 20954 - RNA, 20 nt, Artificial Sequence
  targeting sequence with TTCN PAM
uaagggucauuuuggguuga

SEQ ID NO: 20955 - RNA, 20 nt, Artificial Sequence
  targeting sequence with TTCN PAM
ucauaagggucauuuugggu

SEQ ID NO: 20956 - RNA, 20 nt, Artificial Sequence
  targeting sequence with TTCN PAM
ugugugaccucuucuucaua

SEQ ID NO: 20957 - RNA, 20 nt, Artificial Sequence
  targeting sequence with TTCN PAM
gccuuguacacauaugagcu

SEQ ID NO: 20958 - RNA, 20 nt, Artificial Sequence
  targeting sequence with TTCN PAM
uuucugccuuguacacauau

SEQ ID NO: 20959 - RNA, 20 nt, Artificial Sequence
  targeting sequence with TTCN PAM
caccuacaaaacaaggauag

SEQ ID NO: 20960 - RNA, 20 nt, Artificial Sequence
  targeting sequence with TTCN PAM
uucucaccuacaaaacaagg

SEQ ID NO: 20961 - RNA, 20 nt, Artificial Sequence
  targeting sequence with TTCN PAM
ggccccacguccccccuacu

SEQ ID NO: 20962 - RNA, 20 nt, Artificial Sequence
  targeting sequence with TTCN PAM
gccaugcugcuucucaaaau

SEQ ID NO: 20963 - RNA, 20 nt, Artificial Sequence
  targeting sequence with TTCN PAM
caaaaugugaaaugugccaa

SEQ ID NO: 20964 - RNA, 20 nt, Artificial Sequence
  targeting sequence with TTCN PAM
cauuuugagaagcagcaugg

SEQ ID NO: 20965 - RNA, 20 nt, Artificial Sequence
  targeting sequence with TTCN PAM
ucugagccuuggcacauuuc

SEQ ID NO: 20966 - RNA, 20 nt, Artificial Sequence
  targeting sequence with TTCN PAM
uccucugagccuuggcacau

SEQ ID NO: 20967 - RNA, 20 nt, Artificial Sequence
  targeting sequence with TTCN PAM
uacgcuuucuuccucugagc

SEQ ID NO: 20968 - RNA, 20 nt, Artificial Sequence
  targeting sequence with TTCN PAM
uuguuucuuacgcuuucuuc

SEQ ID NO: 20969 - RNA, 20 nt, Artificial Sequence
  targeting sequence with TTCN PAM
ucaccauuaugugguaacag

SEQ ID NO: 20970 - RNA, 20 nt, Artificial Sequence
  targeting sequence with TTCN PAM
gcuuccucaccauuaugugg

SEQ ID NO: 20971 - RNA, 20 nt, Artificial Sequence
  targeting sequence with TTCN PAM
guuugcccagcuggaaagag

SEQ ID NO: 20972 - RNA, 20 nt, Artificial Sequence
  targeting sequence with TTCN PAM
agcugggcaaacugaagccc

SEQ ID NO: 20973 - RNA, 20 nt, Artificial Sequence
  targeting sequence with TTCN PAM
agcuucuuuaucagccagcu

SEQ ID NO: 20974 - RNA, 20 nt, Artificial Sequence
  targeting sequence with TTCN PAM
uuaucagccagcucugugac

SEQ ID NO: 20975 - RNA, 20 nt, Artificial Sequence
  targeting sequence with TTCN PAM
ucauugguaaaaucggggca

SEQ ID NO: 20976 - RNA, 20 nt, Artificial Sequence
  targeting sequence with TTCN PAM
uaaggaucaaauaagauaau

SEQ ID NO: 20977 - RNA, 20 nt, Artificial Sequence
  targeting sequence with TTCN PAM
agccauucuccugccucagc

SEQ ID NO: 20978 - RNA, 20 nt, Artificial Sequence
  targeting sequence with TTCN PAM
ccugccucagccucccgagu

SEQ ID NO: 20979 - RNA, 20 nt, Artificial Sequence
  targeting sequence with TTCN PAM
uaaauauugaauaacuguga

SEQ ID NO: 20980 - RNA, 20 nt, Artificial Sequence
  targeting sequence with TTCN PAM
auauuuaagaauuguuaaag

SEQ ID NO: 20981 - RNA, 20 nt, Artificial Sequence
  targeting sequence with TTCN PAM
caguuauucaauauuuaaga

SEQ ID NO: 20982 - RNA, 20 nt, Artificial Sequence
  targeting sequence with TTCN PAM
uuuaauaaaaacucuucaca

SEQ ID NO: 20983 - RNA, 20 nt, Artificial Sequence
  targeting sequence with TTCN PAM
gaauucuucauguaaugccu

SEQ ID NO: 20984 - RNA, 20 nt, Artificial Sequence
  targeting sequence with TTCN PAM
gaaagcuuuuaauauggcuc

SEQ ID NO: 20985 - RNA, 20 nt, Artificial Sequence
  targeting sequence with TTCN PAM
ucauguaaugccuuaaguag

SEQ ID NO: 20986 - RNA, 20 nt, Artificial Sequence
  targeting sequence with TTCN PAM
uguaaugccuuaaguaggua

SEQ ID NO: 20987 - RNA, 20 nt, Artificial Sequence
  targeting sequence with TTCN PAM
guagcacuuuauuuucaggc

SEQ ID NO: 20988 - RNA, 20 nt, Artificial Sequence
  targeting sequence with TTCN PAM
ggcaaguuauuuaacuucuc

SEQ ID NO: 20989 - RNA, 20 nt, Artificial Sequence
  targeting sequence with TTCN PAM
cuguaccauaguuuucucau

SEQ ID NO: 20990 - RNA, 20 nt, Artificial Sequence
  targeting sequence with TTCN PAM
caucugugaaacagguauac

SEQ ID NO: 20991 - RNA, 20 nt, Artificial Sequence
  targeting sequence with TTCN PAM
cagaugagaaaacuauggua

SEQ ID NO: 20992 - RNA, 20 nt, Artificial Sequence
  targeting sequence with TTCN PAM
agggagcagaaggcagcaua

SEQ ID NO: 20993 - RNA, 20 nt, Artificial Sequence
  targeting sequence with TTCN PAM
gcucccuugaauuacugcca

SEQ ID NO: 20994 - RNA, 20 nt, Artificial Sequence
  targeting sequence with TTCN PAM
agacagcaccugcugagcuc

SEQ ID NO: 20995 - RNA, 20 nt, Artificial Sequence
  targeting sequence with TTCN PAM
aaguacugucauugagagug

SEQ ID NO: 20996 - RNA, 20 nt, Artificial Sequence
  targeting sequence with TTCN PAM
aacucuuauuccagacagca

SEQ ID NO: 20997 - RNA, 20 nt, Artificial Sequence
  targeting sequence with TTCN PAM
aaguuacugacaaaagcuug

SEQ ID NO: 20998 - RNA, 20 nt, Artificial Sequence
  targeting sequence with TTCN PAM
gaggccccccaaccaucuga

SEQ ID NO: 20999 - RNA, 20 nt, Artificial Sequence
  targeting sequence with TTCN PAM
gaugguuggggggccucuga

SEQ ID NO: 21000 - RNA, 20 nt, Artificial Sequence
  targeting sequence with TTCN PAM
uucucaaccagggcucuuuu

SEQ ID NO: 21001 - RNA, 20 nt, Artificial Sequence
  targeting sequence with TTCN PAM
caaccagggcucuuuuaaaa

SEQ ID NO: 21002 - RNA, 20 nt, Artificial Sequence
  targeting sequence with TTCN PAM
ggccaugaugggaaaugggg

SEQ ID NO: 21003 - RNA, 20 nt, Artificial Sequence
  targeting sequence with TTCN PAM
caucauggccugaaacaguc

SEQ ID NO: 21004 - RNA, 20 nt, Artificial Sequence
  targeting sequence with TTCN PAM
uaucauacuuaaagucugug

SEQ ID NO: 21005 - RNA, 20 nt, Artificial Sequence
  targeting sequence with TTCN PAM
ucugcaaacaguaacuuggg

SEQ ID NO: 21006 - RNA, 20 nt, Artificial Sequence
  targeting sequence with TTCN PAM
uuucuguugaaccuagguuu

SEQ ID NO: 21007 - RNA, 20 nt, Artificial Sequence
  targeting sequence with TTCN PAM
guugaaccuagguuuuuugu

SEQ ID NO: 21008 - RNA, 20 nt, Artificial Sequence
  targeting sequence with TTCN PAM
acagaaaggaaugccugggu

SEQ ID NO: 21009 - RNA, 20 nt, Artificial Sequence
  targeting sequence with TTCN PAM
gagacagagucucacucugu

SEQ ID NO: 21010 - RNA, 20 nt, Artificial Sequence
  targeting sequence with TTCN PAM
ggguucacgccauucuccug

SEQ ID NO: 21011 - RNA, 20 nt, Artificial Sequence
  targeting sequence with TTCN PAM
cgccauucuccugccucauc

SEQ ID NO: 21012 - RNA, 20 nt, Artificial Sequence
  targeting sequence with TTCN PAM
ccugccucauccucccgugu

SEQ ID NO: 21013 - RNA, 20 nt, Artificial Sequence
  targeting sequence with TTCN PAM
ccguguuagccaggaugguc

SEQ ID NO: 21014 - RNA, 20 nt, Artificial Sequence
  targeting sequence with TTCN PAM
gacaauugguugagcuuauc

SEQ ID NO: 21015 - RNA, 20 nt, Artificial Sequence
  targeting sequence with TTCN PAM
agcuuauagguugauuuaaa

SEQ ID NO: 21016 - RNA, 20 nt, Artificial Sequence
  targeting sequence with TTCN PAM
aguuguuccaucuuucugga

SEQ ID NO: 21017 - RNA, 20 nt, Artificial Sequence
  targeting sequence with TTCN PAM
aucuuucuggaccaaaccaa

SEQ ID NO: 21018 - RNA, 20 nt, Artificial Sequence
  targeting sequence with TTCN PAM
ggaccaaaccaaugcauuuc

SEQ ID NO: 21019 - RNA, 20 nt, Artificial Sequence
  targeting sequence with TTCN PAM
uaaauguauuugauugaagu

SEQ ID NO: 21020 - RNA, 20 nt, Artificial Sequence
  targeting sequence with TTCN PAM
aucaaauacauuuaagaaau

SEQ ID NO: 21021 - RNA, 20 nt, Artificial Sequence
  targeting sequence with TTCN PAM
cuaaaaugugucaaaccgag

SEQ ID NO: 21022 - RNA, 20 nt, Artificial Sequence
  targeting sequence with TTCN PAM
caggaccaccugagggcugu

SEQ ID NO: 21023 - RNA, 20 nt, Artificial Sequence
  targeting sequence with TTCN PAM
gagccaaauaugagugacca

SEQ ID NO: 21024 - RNA, 20 nt, Artificial Sequence
  targeting sequence with TTCN PAM
gauauuuuacagaguuugau

SEQ ID NO: 21025 - RNA, 20 nt, Artificial Sequence
  targeting sequence with TTCN PAM
gucaaauuaaauuauuuuga

SEQ ID NO: 21026 - RNA, 20 nt, Artificial Sequence
  targeting sequence with TTCN PAM
ugccaacacaaguaaucaaa

SEQ ID NO: 21027 - RNA, 20 nt, Artificial Sequence
  targeting sequence with TTCN PAM
gagccuaauaugagugacca

SEQ ID NO: 21028 - RNA, 20 nt, Artificial Sequence
  targeting sequence with TTCN PAM
guggaccuccugagggcugu

SEQ ID NO: 21029 - RNA, 20 nt, Artificial Sequence
  targeting sequence with TTCN PAM
uaaauguaucugauugaugu

SEQ ID NO: 21030 - RNA, 20 nt, Artificial Sequence
  targeting sequence with TTCN PAM
ggaucaaaccaauguauuuc

SEQ ID NO: 21031 - RNA, 20 nt, Artificial Sequence
  targeting sequence with TTCN PAM
aggcuauagguaaauuuaaa

SEQ ID NO: 21032 - RNA, 20 nt, Artificial Sequence
  targeting sequence with TTCN PAM
ggcugacaauuggcugaguu

SEQ ID NO: 21033 - RNA, 20 nt, Artificial Sequence
  targeting sequence with TTCN PAM
guugaucccaggucuuuaaa

SEQ ID NO: 21034 - RNA, 20 nt, Artificial Sequence
  targeting sequence with TTCN PAM
uuucuguugaucccaggucu

SEQ ID NO: 21035 - RNA, 20 nt, Artificial Sequence
  targeting sequence with TTCN PAM
uauuugcagaggaagccuuc

SEQ ID NO: 21036 - RNA, 20 nt, Artificial Sequence
  targeting sequence with TTCN PAM
ucugcaaauaagaacauggg

SEQ ID NO: 21037 - RNA, 20 nt, Artificial Sequence
  targeting sequence with TTCN PAM
gguacuaggcuucagaaaga

SEQ ID NO: 21038 - RNA, 20 nt, Artificial Sequence
  targeting sequence with TTCN PAM
gaaagaauagguuguaaaau

SEQ ID NO: 21039 - RNA, 20 nt, Artificial Sequence
  targeting sequence with TTCN PAM
gaagccuaguacccgaaggc

SEQ ID NO: 21040 - RNA, 20 nt, Artificial Sequence
  targeting sequence with TTCN PAM
uucugaagccuaguacccga

SEQ ID NO: 21041 - RNA, 20 nt, Artificial Sequence
  targeting sequence with TTCN PAM
ucucacccugcaaaacagag

SEQ ID NO: 21042 - RNA, 20 nt, Artificial Sequence
  targeting sequence with TTCN PAM
cacccugcaaaacagagucu

SEQ ID NO: 21043 - RNA, 20 nt, Artificial Sequence
  targeting sequence with TTCN PAM
agcaauucuccugccucagc

SEQ ID NO: 21044 - RNA, 20 nt, Artificial Sequence
  targeting sequence with TTCN PAM
ccugccucagccucccuagu

SEQ ID NO: 21045 - RNA, 20 nt, Artificial Sequence
  targeting sequence with TTCN PAM
ccauguuggucaggcuggcc

SEQ ID NO: 21046 - RNA, 20 nt, Artificial Sequence
  targeting sequence with TTCN PAM
cgucauggccugaaacaguc

SEQ ID NO: 21047 - RNA, 20 nt, Artificial Sequence
  targeting sequence with TTCN PAM
ggccaugacgggaagugggc

SEQ ID NO: 21048 - RNA, 20 nt, Artificial Sequence
  targeting sequence with TTCN PAM
uccucaaccagggcucuuuu

SEQ ID NO: 21049 - RNA, 20 nt, Artificial Sequence
  targeting sequence with TTCN PAM
gacgguugggggggcuuaca

SEQ ID NO: 21050 - RNA, 20 nt, Artificial Sequence
  targeting sequence with TTCN PAM
cacuuucaugucuuugcuug

SEQ ID NO: 21051 - RNA, 20 nt, Artificial Sequence
  targeting sequence with TTCN PAM
ugucuuugcuuguuuuauuu

SEQ ID NO: 21052 - RNA, 20 nt, Artificial Sequence
  targeting sequence with TTCN PAM
uugccugaaauguccuuuac

SEQ ID NO: 21053 - RNA, 20 nt, Artificial Sequence
  targeting sequence with TTCN PAM
ggcaaagaaaauaaaacaag

SEQ ID NO: 21054 - RNA, 20 nt, Artificial Sequence
  targeting sequence with TTCN PAM
aaagcccuaccuuuuucaaa

SEQ ID NO: 21055 - RNA, 20 nt, Artificial Sequence
  targeting sequence with TTCN PAM
aauaucuucuucauuaaucu

SEQ ID NO: 21056 - RNA, 20 nt, Artificial Sequence
  targeting sequence with TTCN PAM
ucauuaaucuuuuucugauc

SEQ ID NO: 21057 - RNA, 20 nt, Artificial Sequence
  targeting sequence with TTCN PAM
uuaaucuuuuucugauccuc

SEQ ID NO: 21058 - RNA, 20 nt, Artificial Sequence
  targeting sequence with TTCN PAM
gauccucuccuugaauuaaa

SEQ ID NO: 21059 - RNA, 20 nt, Artificial Sequence
  targeting sequence with TTCN PAM
aggagaggaucagaaaaaga

SEQ ID NO: 21060 - RNA, 20 nt, Artificial Sequence
  targeting sequence with TTCN PAM
acagcauuuuaauucaagga

SEQ ID NO: 21061 - RNA, 20 nt, Artificial Sequence
  targeting sequence with TTCN PAM
auugcuguugagacaacaaa

SEQ ID NO: 21062 - RNA, 20 nt, Artificial Sequence
  targeting sequence with TTCN PAM
acucguaaccucacucuggu

SEQ ID NO: 21063 - RNA, 20 nt, Artificial Sequence
  targeting sequence with TTCN PAM
ccuguuaaacuucuacucgu

SEQ ID NO: 21064 - RNA, 20 nt, Artificial Sequence
  targeting sequence with TTCN PAM
uucgccuguuaaacuucuac

SEQ ID NO: 21065 - RNA, 20 nt, Artificial Sequence
  targeting sequence with TTCN PAM
cuuucuuucgccuguuaaac

SEQ ID NO: 21066 - RNA, 20 nt, Artificial Sequence
  targeting sequence with TTCN PAM
cgaaaaaaugaguugccacc

SEQ ID NO: 21067 - RNA, 20 nt, Artificial Sequence
  targeting sequence with TTCN PAM
agaacgcugucagcugcagu

SEQ ID NO: 21068 - RNA, 20 nt, Artificial Sequence
  targeting sequence with TTCN PAM
ccacagagguggcaacucau

SEQ ID NO: 21069 - RNA, 20 nt, Artificial Sequence
  targeting sequence with TTCN PAM
uuugcauaacuuucgaaaaa

SEQ ID NO: 21070 - RNA, 20 nt, Artificial Sequence
  targeting sequence with TTCN PAM
aaaaacugguuagggcuagg

SEQ ID NO: 21071 - RNA, 20 nt, Artificial Sequence
  targeting sequence with TTCN PAM
aaaguuaugcaaaugaaaca

SEQ ID NO: 21072 - RNA, 20 nt, Artificial Sequence
  targeting sequence with TTCN PAM
cacccaaugcaaaugacaca

SEQ ID NO: 21073 - RNA, 20 nt, Artificial Sequence
  targeting sequence with TTCN PAM
uuacuguacacguggugaca

SEQ ID NO: 21074 - RNA, 20 nt, Artificial Sequence
  targeting sequence with TTCN PAM
guccucccuuuaauuuguca

SEQ ID NO: 21075 - RNA, 20 nt, Artificial Sequence
  targeting sequence with TTCN PAM
acauggagguucuguccucc

SEQ ID NO: 21076 - RNA, 20 nt, Artificial Sequence
  targeting sequence with TTCN PAM
auuggcacagcugccggcau

SEQ ID NO: 21077 - RNA, 20 nt, Artificial Sequence
  targeting sequence with TTCN PAM
ccagugcaagcuuccagcuu

SEQ ID NO: 21078 - RNA, 20 nt, Artificial Sequence
  targeting sequence with TTCN PAM
agcuugccuuuuuauuuauu

SEQ ID NO: 21079 - RNA, 20 nt, Artificial Sequence
  targeting sequence with TTCN PAM
uccgucgcccagacuggagu

SEQ ID NO: 21080 - RNA, 20 nt, Artificial Sequence
  targeting sequence with TTCN PAM
agugauucuccugccucagc

SEQ ID NO: 21081 - RNA, 20 nt, Artificial Sequence
  targeting sequence with TTCN PAM
ccugccucagccucucgagu

SEQ ID NO: 21082 - RNA, 20 nt, Artificial Sequence
  targeting sequence with TTCN PAM
cuauguuggccaggcugguc

SEQ ID NO: 21083 - RNA, 20 nt, Artificial Sequence
  targeting sequence with TTCN PAM
agaccagccuggccaacaua

SEQ ID NO: 21084 - RNA, 20 nt, Artificial Sequence
  targeting sequence with TTCN PAM
uccugccuuggccucccaga

SEQ ID NO: 21085 - RNA, 20 nt, Artificial Sequence
  targeting sequence with TTCN PAM
ggcugcucuuuguuagaaaa

SEQ ID NO: 21086 - RNA, 20 nt, Artificial Sequence
  targeting sequence with TTCN PAM
aacaaagagcagccugaaaa

SEQ ID NO: 21087 - RNA, 20 nt, Artificial Sequence
  targeting sequence with TTCN PAM
ugggcugcuuuuuauuaaaa

SEQ ID NO: 21088 - RNA, 20 nt, Artificial Sequence
  targeting sequence with TTCN PAM
cuuuuaauaaaaagcagccc

SEQ ID NO: 21089 - RNA, 20 nt, Artificial Sequence
  targeting sequence with TTCN PAM
gccgaagacucuuuuaccuu

SEQ ID NO: 21090 - RNA, 20 nt, Artificial Sequence
  targeting sequence with TTCN PAM
gcagaacuucccuuuuaaua

SEQ ID NO: 21091 - RNA, 20 nt, Artificial Sequence
  targeting sequence with TTCN PAM
cuaucuggcuaaauaauuuc

SEQ ID NO: 21092 - RNA, 20 nt, Artificial Sequence
  targeting sequence with TTCN PAM
uucuagcuccuguaucacug

SEQ ID NO: 21093 - RNA, 20 nt, Artificial Sequence
  targeting sequence with TTCN PAM
agcuccuguaucacugcguc

SEQ ID NO: 21094 - RNA, 20 nt, Artificial Sequence
  targeting sequence with TTCN PAM
uccuucgaauccuguuuuca

SEQ ID NO: 21095 - RNA, 20 nt, Artificial Sequence
  targeting sequence with TTCN PAM
aauccuguuuucaugugucu

SEQ ID NO: 21096 - RNA, 20 nt, Artificial Sequence
  targeting sequence with TTCN PAM
aaggaggaagacgcagugau

SEQ ID NO: 21097 - RNA, 20 nt, Artificial Sequence
  targeting sequence with TTCN PAM
ugugucucuuaaagccuuua

SEQ ID NO: 21098 - RNA, 20 nt, Artificial Sequence
  targeting sequence with TTCN PAM
guauuucauccaaucuaaua

SEQ ID NO: 21099 - RNA, 20 nt, Artificial Sequence
  targeting sequence with TTCN PAM
uccaaucuaauaggucauug

SEQ ID NO: 21100 - RNA, 20 nt, Artificial Sequence
  targeting sequence with TTCN PAM
uauugauacacaaaacaaug

SEQ ID NO: 21101 - RNA, 20 nt, Artificial Sequence
  targeting sequence with TTCN PAM
guguaacuggcagcauuuuu

SEQ ID NO: 21102 - RNA, 20 nt, Artificial Sequence
  targeting sequence with TTCN PAM
caccucuaagguugugucuu

SEQ ID NO: 21103 - RNA, 20 nt, Artificial Sequence
  targeting sequence with TTCN PAM
cauuuucucaccucuaaggu

SEQ ID NO: 21104 - RNA, 20 nt, Artificial Sequence
  targeting sequence with TTCN PAM
aaagcuuacauuuuuuuuuc

SEQ ID NO: 21105 - RNA, 20 nt, Artificial Sequence
  targeting sequence with TTCN PAM
uugugaaagugucuguuuca

SEQ ID NO: 21106 - RNA, 20 nt, Artificial Sequence
  targeting sequence with TTCN PAM
caaagaacuaccauauguca

SEQ ID NO: 21107 - RNA, 20 nt, Artificial Sequence
  targeting sequence with TTCN PAM
caccuucucacuggauagua

SEQ ID NO: 21108 - RNA, 20 nt, Artificial Sequence
  targeting sequence with TTCN PAM
cacuggauaguaauuucccu

SEQ ID NO: 21109 - RNA, 20 nt, Artificial Sequence
  targeting sequence with TTCN PAM
cugaggggagggagggauua

SEQ ID NO: 21110 - RNA, 20 nt, Artificial Sequence
  targeting sequence with TTCN PAM
uaucuguuggugccuggcac

SEQ ID NO: 21111 - RNA, 20 nt, Artificial Sequence
  targeting sequence with TTCN PAM
cucauguugucuagccuuua

SEQ ID NO: 21112 - RNA, 20 nt, Artificial Sequence
  targeting sequence with TTCN PAM
aauaauaucauaaaggcuag

SEQ ID NO: 21113 - RNA, 20 nt, Artificial Sequence
  targeting sequence with TTCN PAM
aagggucaacuguugagggu

SEQ ID NO: 21114 - RNA, 20 nt, Artificial Sequence
  targeting sequence with TTCN PAM
ugugucuggcuucuggacaa

SEQ ID NO: 21115 - RNA, 20 nt, Artificial Sequence
  targeting sequence with TTCN PAM
ggacaagaggaaaucaggac

SEQ ID NO: 21116 - RNA, 20 nt, Artificial Sequence
  targeting sequence with TTCN PAM
ucuuguccagaagccagaca

SEQ ID NO: 21117 - RNA, 20 nt, Artificial Sequence
  targeting sequence with TTCN PAM
aucaugauccacucaguagu

SEQ ID NO: 21118 - RNA, 20 nt, Artificial Sequence
  targeting sequence with TTCN PAM
accgccacaccacagcagcc

SEQ ID NO: 21119 - RNA, 20 nt, Artificial Sequence
  targeting sequence with TTCN PAM
auucaaccgccacaccacag

SEQ ID NO: 21120 - RNA, 20 nt, Artificial Sequence
  targeting sequence with TTCN PAM
uaguuauucuuuuucuccuc

SEQ ID NO: 21121 - RNA, 20 nt, Artificial Sequence
  targeting sequence with TTCN PAM
uuuucuccucaguacacaca

SEQ ID NO: 21122 - RNA, 20 nt, Artificial Sequence
  targeting sequence with TTCN PAM
ccucaguacacacacagugu

SEQ ID NO: 21123 - RNA, 20 nt, Artificial Sequence
  targeting sequence with TTCN PAM
uaauggcaauaaaguuuacu

SEQ ID NO: 21124 - RNA, 20 nt, Artificial Sequence
  targeting sequence with TTCN PAM
uggccauuagcagacuucau

SEQ ID NO: 21125 - RNA, 20 nt, Artificial Sequence
  targeting sequence with TTCN PAM
ucauuuugguuccuaauugu

SEQ ID NO: 21126 - RNA, 20 nt, Artificial Sequence
  targeting sequence with TTCN PAM
uaauugucuuuuucccuugu

SEQ ID NO: 21127 - RNA, 20 nt, Artificial Sequence
  targeting sequence with TTCN PAM
cuugucuucuguucaguaua

SEQ ID NO: 21128 - RNA, 20 nt, Artificial Sequence
  targeting sequence with TTCN PAM
guucaguauaaaugacaucg

SEQ ID NO: 21129 - RNA, 20 nt, Artificial Sequence
  targeting sequence with TTCN PAM
guauaaaugacaucgcauuu

SEQ ID NO: 21130 - RNA, 20 nt, Artificial Sequence
  targeting sequence with TTCN PAM
aucaggcuuaaaugcgaugu

SEQ ID NO: 21131 - RNA, 20 nt, Artificial Sequence
  targeting sequence with TTCN PAM
ggcagccaaaaucaguugag

SEQ ID NO: 21132 - RNA, 20 nt, Artificial Sequence
  targeting sequence with TTCN PAM
ucuuaaagugcuucccuaac

SEQ ID NO: 21133 - RNA, 20 nt, Artificial Sequence
  targeting sequence with TTCN PAM
cuaaccucccucuugugagu

SEQ ID NO: 21134 - RNA, 20 nt, Artificial Sequence
  targeting sequence with TTCN PAM
gaguacucacaagagggagg

SEQ ID NO: 21135 - RNA, 20 nt, Artificial Sequence
  targeting sequence with TTCN PAM
acccuugccuuuuuaaucuc

SEQ ID NO: 21136 - RNA, 20 nt, Artificial Sequence
  targeting sequence with TTCN PAM
cuauuacuuuuuaauaggga

SEQ ID NO: 21137 - RNA, 20 nt, Artificial Sequence
  targeting sequence with TTCN PAM
aucccuauuaaaaaguaaua

SEQ ID NO: 21138 - RNA, 20 nt, Artificial Sequence
  targeting sequence with TTCN PAM
uaucugauaguuuacuugcc

SEQ ID NO: 21139 - RNA, 20 nt, Artificial Sequence
  targeting sequence with TTCN PAM
cagguucuuaucugauaguu

SEQ ID NO: 21140 - RNA, 20 nt, Artificial Sequence
  targeting sequence with TTCN PAM
ucuuucccuuuuuacuuuga

SEQ ID NO: 21141 - RNA, 20 nt, Artificial Sequence
  targeting sequence with TTCN PAM
cuuuuuacuuugagacaccc

SEQ ID NO: 21142 - RNA, 20 nt, Artificial Sequence
  targeting sequence with TTCN PAM
ugggugucucaaaguaaaaa

SEQ ID NO: 21143 - RNA, 20 nt, Artificial Sequence
  targeting sequence with TTCN PAM
acucuuucaugggugucuca

SEQ ID NO: 21144 - RNA, 20 nt, Artificial Sequence
  targeting sequence with TTCN PAM
aaggcauugugauuguuuuc

SEQ ID NO: 21145 - RNA, 20 nt, Artificial Sequence
  targeting sequence with TTCN PAM
gggggacaaaauguaaacug

SEQ ID NO: 21146 - RNA, 20 nt, Artificial Sequence
  targeting sequence with TTCN PAM
agcaacaggacugacggugc

SEQ ID NO: 21147 - RNA, 20 nt, Artificial Sequence
  targeting sequence with TTCN PAM
uggacacagcaccgucaguc

SEQ ID NO: 21148 - RNA, 20 nt, Artificial Sequence
  targeting sequence with TTCN PAM
auauggauguuguccuauuu

SEQ ID NO: 21149 - RNA, 20 nt, Artificial Sequence
  targeting sequence with TTCN PAM
uauuuucaaauaacauaagc

SEQ ID NO: 21150 - RNA, 20 nt, Artificial Sequence
  targeting sequence with TTCN PAM
aauaacauaagcucccucug

SEQ ID NO: 21151 - RNA, 20 nt, Artificial Sequence
  targeting sequence with TTCN PAM
agagggagcuuauguuauuu

SEQ ID NO: 21152 - RNA, 20 nt, Artificial Sequence
  targeting sequence with TTCN PAM
gagaaccccuuauguuugac

SEQ ID NO: 21153 - RNA, 20 nt, Artificial Sequence
  targeting sequence with TTCN PAM
cugaaaauuacuuuuauaua

SEQ ID NO: 21154 - RNA, 20 nt, Artificial Sequence
  targeting sequence with TTCN PAM
gucuaagucuacuuccucuu

SEQ ID NO: 21155 - RNA, 20 nt, Artificial Sequence
  targeting sequence with TTCN PAM
ucuucucuguugucucuaga

SEQ ID NO: 21156 - RNA, 20 nt, Artificial Sequence
  targeting sequence with TTCN PAM
cuguugucucuagauacgca

SEQ ID NO: 21157 - RNA, 20 nt, Artificial Sequence
  targeting sequence with TTCN PAM
uuguaugguuaacuacauaa

SEQ ID NO: 21158 - RNA, 20 nt, Artificial Sequence
  targeting sequence with TTCN PAM
gcagacuucucuccagugua

SEQ ID NO: 21159 - RNA, 20 nt, Artificial Sequence
  targeting sequence with TTCN PAM
cuccaguguaaacaauccaa

SEQ ID NO: 21160 - RNA, 20 nt, Artificial Sequence
  targeting sequence with TTCN PAM
acauagguuaucuuuuccaa

SEQ ID NO: 21161 - RNA, 20 nt, Artificial Sequence
  targeting sequence with TTCN PAM
aauacucuaaccauuucaga

SEQ ID NO: 21162 - RNA, 20 nt, Artificial Sequence
  targeting sequence with TTCN PAM
gaaaguuuccgcuugauuuc

SEQ ID NO: 21163 - RNA, 20 nt, Artificial Sequence
  targeting sequence with TTCN PAM
gaaaugguuagaguauugga

SEQ ID NO: 21164 - RNA, 20 nt, Artificial Sequence
  targeting sequence with TTCN PAM
gcuugauuucucagauggug

SEQ ID NO: 21165 - RNA, 20 nt, Artificial Sequence
  targeting sequence with TTCN PAM
cagauggugugugugugugu

SEQ ID NO: 21166 - RNA, 20 nt, Artificial Sequence
  targeting sequence with TTCN PAM
caccauucuccugccucagc

SEQ ID NO: 21167 - RNA, 20 nt, Artificial Sequence
  targeting sequence with TTCN PAM
ccugccucagccuccugagu

SEQ ID NO: 21168 - RNA, 20 nt, Artificial Sequence
  targeting sequence with TTCN PAM
ccguguuagccaggaugguc

SEQ ID NO: 21169 - RNA, 20 nt, Artificial Sequence
  targeting sequence with TTCN PAM
uagagacaggguugugcucu

SEQ ID NO: 21170 - RNA, 20 nt, Artificial Sequence
  targeting sequence with TTCN PAM
caccucagccucccgaguag

SEQ ID NO: 21171 - RNA, 20 nt, Artificial Sequence
  targeting sequence with TTCN PAM
ugguuacccaacuuuaaguc

SEQ ID NO: 21172 - RNA, 20 nt, Artificial Sequence
  targeting sequence with TTCN PAM
aaaucuguagccaauaaaaa

SEQ ID NO: 21173 - RNA, 20 nt, Artificial Sequence
  targeting sequence with TTCN PAM
ugcaggguugcuacugcuau

SEQ ID NO: 21174 - RNA, 20 nt, Artificial Sequence
  targeting sequence with TTCN PAM
gacuaauagauaucacauag

SEQ ID NO: 21175 - RNA, 20 nt, Artificial Sequence
  targeting sequence with TTCN PAM
gccccucaagggacacaaag

SEQ ID NO: 21176 - RNA, 20 nt, Artificial Sequence
  targeting sequence with TTCN PAM
cauaugccacacaguacaca

SEQ ID NO: 21177 - RNA, 20 nt, Artificial Sequence
  targeting sequence with TTCN PAM
auucucuauaauagccucau

SEQ ID NO: 21178 - RNA, 20 nt, Artificial Sequence
  targeting sequence with TTCN PAM
cuauaauagccucaucauug

SEQ ID NO: 21179 - RNA, 20 nt, Artificial Sequence
  targeting sequence with TTCN PAM
ucaccuguccucaucucaau

SEQ ID NO: 21180 - RNA, 20 nt, Artificial Sequence
  targeting sequence with TTCN PAM
aagucuuuuuccucaccugu

SEQ ID NO: 21181 - RNA, 20 nt, Artificial Sequence
  targeting sequence with TTCN PAM
auuuugacugagaaucaaaa

SEQ ID NO: 21182 - RNA, 20 nt, Artificial Sequence
  targeting sequence with TTCN PAM
guaguuccauuuugacugag

SEQ ID NO: 21183 - RNA, 20 nt, Artificial Sequence
  targeting sequence with TTCN PAM
ucagugaaauaggaagcaac

SEQ ID NO: 21184 - RNA, 20 nt, Artificial Sequence
  targeting sequence with TTCN PAM
gugaaauaggaagcaacagc

SEQ ID NO: 21185 - RNA, 20 nt, Artificial Sequence
  targeting sequence with TTCN PAM
cugaagaaaaaaaaaaugga

SEQ ID NO: 21186 - RNA, 20 nt, Artificial Sequence
  targeting sequence with TTCN PAM
uauuucacugaagaaaaaaa

SEQ ID NO: 21187 - RNA, 20 nt, Artificial Sequence
  targeting sequence with TTCN PAM
ccauugccacucucaguugc

SEQ ID NO: 21188 - RNA, 20 nt, Artificial Sequence
  targeting sequence with TTCN PAM
gagaguugaagagaaaggga

SEQ ID NO: 21189 - RNA, 20 nt, Artificial Sequence
  targeting sequence with TTCN PAM
acucucugaaaccucccuuc

SEQ ID NO: 21190 - RNA, 20 nt, Artificial Sequence
  targeting sequence with TTCN PAM
cuucaacucucugaaaccuc

SEQ ID NO: 21191 - RNA, 20 nt, Artificial Sequence
  targeting sequence with TTCN PAM
cuuucucuucaacucucuga

SEQ ID NO: 21192 - RNA, 20 nt, Artificial Sequence
  targeting sequence with TTCN PAM
cugaggcagugacuuuacac

SEQ ID NO: 21193 - RNA, 20 nt, Artificial Sequence
  targeting sequence with TTCN PAM
gccucuacaacuaugcagcu

SEQ ID NO: 21194 - RNA, 20 nt, Artificial Sequence
  targeting sequence with TTCN PAM
ccucuucugccucuacaacu

SEQ ID NO: 21195 - RNA, 20 nt, Artificial Sequence
  targeting sequence with TTCN PAM
aaugugcuugcaaaaccacc

SEQ ID NO: 21196 - RNA, 20 nt, Artificial Sequence
  targeting sequence with TTCN PAM
ucuucaaaugugcuugcaaa

SEQ ID NO: 21197 - RNA, 20 nt, Artificial Sequence
  targeting sequence with TTCN PAM
caacccaccugguaccccaa

SEQ ID NO: 21198 - RNA, 20 nt, Artificial Sequence
  targeting sequence with TTCN PAM
uucccaacccaccugguacc

SEQ ID NO: 21199 - RNA, 20 nt, Artificial Sequence
  targeting sequence with TTCN PAM
cuuccuucccaacccaccug

SEQ ID NO: 21200 - RNA, 20 nt, Artificial Sequence
  targeting sequence with TTCN PAM
ugcaccacuucccuuccuuc

SEQ ID NO: 21201 - RNA, 20 nt, Artificial Sequence
  targeting sequence with TTCN PAM
cacuaauccuaugcuguggg

SEQ ID NO: 21202 - RNA, 20 nt, Artificial Sequence
  targeting sequence with TTCN PAM
gugagucugagcugguuauu

SEQ ID NO: 21203 - RNA, 20 nt, Artificial Sequence
  targeting sequence with TTCN PAM
ucauguaucaaauggauaac

SEQ ID NO: 21204 - RNA, 20 nt, Artificial Sequence
  targeting sequence with TTCN PAM
uguaucaaauggauaacauu

SEQ ID NO: 21205 - RNA, 20 nt, Artificial Sequence
  targeting sequence with TTCN PAM
aucugauuaucaaagaggcc

SEQ ID NO: 21206 - RNA, 20 nt, Artificial Sequence
  targeting sequence with TTCN PAM
agaaagaugcaaauucuuca

SEQ ID NO: 21207 - RNA, 20 nt, Artificial Sequence
  targeting sequence with TTCN PAM
agaaaguggucuaaagcuuc

SEQ ID NO: 21208 - RNA, 20 nt, Artificial Sequence
  targeting sequence with TTCN PAM
ucauguguaugcagaauuuc

SEQ ID NO: 21209 - RNA, 20 nt, Artificial Sequence
  targeting sequence with TTCN PAM
uguguaugcagaauuucaug

SEQ ID NO: 21210 - RNA, 20 nt, Artificial Sequence
  targeting sequence with TTCN PAM
cuuuaguccugcauaaagac

SEQ ID NO: 21211 - RNA, 20 nt, Artificial Sequence
  targeting sequence with TTCN PAM
guaggauuauaggcaugagc

SEQ ID NO: 21212 - RNA, 20 nt, Artificial Sequence
  targeting sequence with TTCN PAM
caacucaggcucccagagcu

SEQ ID NO: 21213 - RNA, 20 nt, Artificial Sequence
  targeting sequence with TTCN PAM
ugcuucauagucaggugugc

SEQ ID NO: 21214 - RNA, 20 nt, Artificial Sequence
  targeting sequence with TTCN PAM
uagucaggugugcuguacca

SEQ ID NO: 21215 - RNA, 20 nt, Artificial Sequence
  targeting sequence with TTCN PAM
aguucagaauaauguuuuag

SEQ ID NO: 21216 - RNA, 20 nt, Artificial Sequence
  targeting sequence with TTCN PAM
gaauaauguuuuagggagac

SEQ ID NO: 21217 - RNA, 20 nt, Artificial Sequence
  targeting sequence with TTCN PAM
gaacuugaacucaaacaugc

SEQ ID NO: 21218 - RNA, 20 nt, Artificial Sequence
  targeting sequence with TTCN PAM
gcucuccaggcucccuccuc

SEQ ID NO: 21219 - RNA, 20 nt, Artificial Sequence
  targeting sequence with TTCN PAM
gucucauccuaguggcuguu

SEQ ID NO: 21220 - RNA, 20 nt, Artificial Sequence
  targeting sequence with TTCN PAM
ucaacagccacuaggaugag

SEQ ID NO: 21221 - RNA, 20 nt, Artificial Sequence
  targeting sequence with TTCN PAM
guaccuacugggccuuauac

SEQ ID NO: 21222 - RNA, 20 nt, Artificial Sequence
  targeting sequence with TTCN PAM
aacaacucucugaagcaggc

SEQ ID NO: 21223 - RNA, 20 nt, Artificial Sequence
  targeting sequence with TTCN PAM
gagaguuguuggaagcauca

SEQ ID NO: 21224 - RNA, 20 nt, Artificial Sequence
  targeting sequence with TTCN PAM
caucuuugagcggagauaag

SEQ ID NO: 21225 - RNA, 20 nt, Artificial Sequence
  targeting sequence with TTCN PAM
cugacugcagagucuuuguu

SEQ ID NO: 21226 - RNA, 20 nt, Artificial Sequence
  targeting sequence with TTCN PAM
uucuaguguaucaugcugcc

SEQ ID NO: 21227 - RNA, 20 nt, Artificial Sequence
  targeting sequence with TTCN PAM
aguguaucaugcugccucuu

SEQ ID NO: 21228 - RNA, 20 nt, Artificial Sequence
  targeting sequence with TTCN PAM
ugaacaaaaaaacuaugucu

SEQ ID NO: 21229 - RNA, 20 nt, Artificial Sequence
  targeting sequence with TTCN PAM
uauuauauuguuuuucuuga

SEQ ID NO: 21230 - RNA, 20 nt, Artificial Sequence
  targeting sequence with TTCN PAM
ucauauuauauuguuuuucu

SEQ ID NO: 21231 - RNA, 20 nt, Artificial Sequence
  targeting sequence with TTCN PAM
auuauuucuucauauuauau

SEQ ID NO: 21232 - RNA, 20 nt, Artificial Sequence
  targeting sequence with TTCN PAM
auuccaggcccaguucuaag

SEQ ID NO: 21233 - RNA, 20 nt, Artificial Sequence
  targeting sequence with TTCN PAM
aggcccaguucuaagcaaca

SEQ ID NO: 21234 - RNA, 20 nt, Artificial Sequence
  targeting sequence with TTCN PAM
aagcaacauaaggguuaggg

SEQ ID NO: 21235 - RNA, 20 nt, Artificial Sequence
  targeting sequence with TTCN PAM
gaaccccccaaaacuuuacu

SEQ ID NO: 21236 - RNA, 20 nt, Artificial Sequence
  targeting sequence with TTCN PAM
gaaauuacaugcagauuuuu

SEQ ID NO: 21237 - RNA, 20 nt, Artificial Sequence
  targeting sequence with TTCN PAM
uaaaauaagcuagauaaaau

SEQ ID NO: 21238 - RNA, 20 nt, Artificial Sequence
  targeting sequence with TTCN PAM
caauuaacauuuuaucuagc

SEQ ID NO: 21239 - RNA, 20 nt, Artificial Sequence
  targeting sequence with TTCN PAM
uuuuucucaauuaacauuuu

SEQ ID NO: 21240 - RNA, 20 nt, Artificial Sequence
  targeting sequence with TTCN PAM
uuaaauggaaguggaucauc

SEQ ID NO: 21241 - RNA, 20 nt, Artificial Sequence
  targeting sequence with TTCN PAM
auuuaaugaagaguaaauau

SEQ ID NO: 21242 - RNA, 20 nt, Artificial Sequence
  targeting sequence with TTCN PAM
ucuucauugucuucagguug

SEQ ID NO: 21243 - RNA, 20 nt, Artificial Sequence
  targeting sequence with TTCN PAM
uugucuucagguugaauagg

SEQ ID NO: 21244 - RNA, 20 nt, Artificial Sequence
  targeting sequence with TTCN PAM
gguugaauaggcugaggagg

SEQ ID NO: 21245 - RNA, 20 nt, Artificial Sequence
  targeting sequence with TTCN PAM
accugaagacaaugaagaug

SEQ ID NO: 21246 - RNA, 20 nt, Artificial Sequence
  targeting sequence with TTCN PAM
uccuccuccuccuccuccuc

SEQ ID NO: 21247 - RNA, 20 nt, Artificial Sequence
  targeting sequence with TTCN PAM
uuugccucugucucccuggc

SEQ ID NO: 21248 - RNA, 20 nt, Artificial Sequence
  targeting sequence with TTCN PAM
cauguaaaaguggacucaug

SEQ ID NO: 21249 - RNA, 20 nt, Artificial Sequence
  targeting sequence with TTCN PAM
ggggucaacuguauguacac

SEQ ID NO: 21250 - RNA, 20 nt, Artificial Sequence
  targeting sequence with TTCN PAM
caccaaccaugagguaaaua

SEQ ID NO: 21251 - RNA, 20 nt, Artificial Sequence
  targeting sequence with TTCN PAM
aauaaggaaaugaaagcucu

SEQ ID NO: 21252 - RNA, 20 nt, Artificial Sequence
  targeting sequence with TTCN PAM
uuauuugaaaaauggauaca

SEQ ID NO: 21253 - RNA, 20 nt, Artificial Sequence
  targeting sequence with TTCN PAM
uuuccuuauuugaaaaaugg

SEQ ID NO: 21254 - RNA, 20 nt, Artificial Sequence
  targeting sequence with TTCN PAM
guagcuuguuugggucaugc

SEQ ID NO: 21255 - RNA, 20 nt, Artificial Sequence
  targeting sequence with TTCN PAM
ucaccaucaccugcuaccua

SEQ ID NO: 21256 - RNA, 20 nt, Artificial Sequence
  targeting sequence with TTCN PAM
aucacuccucccucauccug

SEQ ID NO: 21257 - RNA, 20 nt, Artificial Sequence
  targeting sequence with TTCN PAM
uuguuuauuuaguauuugca

SEQ ID NO: 21258 - RNA, 20 nt, Artificial Sequence
  targeting sequence with TTCN PAM
gcuacuguaaaagguacuug

SEQ ID NO: 21259 - RNA, 20 nt, Artificial Sequence
  targeting sequence with TTCN PAM
caaagugcugagaucacaag

SEQ ID NO: 21260 - RNA, 20 nt, Artificial Sequence
  targeting sequence with TTCN PAM
ucagagucuuuuuaugggag

SEQ ID NO: 21261 - RNA, 20 nt, Artificial Sequence
  targeting sequence with TTCN PAM
ucuguguuucagaugaaggc

SEQ ID NO: 21262 - RNA, 20 nt, Artificial Sequence
  targeting sequence with TTCN PAM
gaugaaggcauugaggcuca

SEQ ID NO: 21263 - RNA, 20 nt, Artificial Sequence
  targeting sequence with TTCN PAM
ucugaaacacagaggaacag

SEQ ID NO: 21264 - RNA, 20 nt, Artificial Sequence
  targeting sequence with TTCN PAM
cugagccucaaugccuucau

SEQ ID NO: 21265 - RNA, 20 nt, Artificial Sequence
  targeting sequence with TTCN PAM
acuugcccugugaauaaagu

SEQ ID NO: 21266 - RNA, 20 nt, Artificial Sequence
  targeting sequence with TTCN PAM
cagggcaaguggaaggugac

SEQ ID NO: 21267 - RNA, 20 nt, Artificial Sequence
  targeting sequence with TTCN PAM
guacaucuuaaggacuuuua

SEQ ID NO: 21268 - RNA, 20 nt, Artificial Sequence
  targeting sequence with TTCN PAM
uucauaaagcccaaguagua

SEQ ID NO: 21269 - RNA, 20 nt, Artificial Sequence
  targeting sequence with TTCN PAM
uaaagcccaaguaguaugaa

SEQ ID NO: 21270 - RNA, 20 nt, Artificial Sequence
  targeting sequence with TTCN PAM
uacuacuugggcuuuaugaa

SEQ ID NO: 21271 - RNA, 20 nt, Artificial Sequence
  targeting sequence with TTCN PAM
cauuuucauacuacuugggc

SEQ ID NO: 21272 - RNA, 20 nt, Artificial Sequence
  targeting sequence with TTCN PAM
uuggcuucccauugcuuuag

SEQ ID NO: 21273 - RNA, 20 nt, Artificial Sequence
  targeting sequence with TTCN PAM
cauugcuuuaggauaaagag

SEQ ID NO: 21274 - RNA, 20 nt, Artificial Sequence
  targeting sequence with TTCN PAM
cucagacaugccaggcuuuu

SEQ ID NO: 21275 - RNA, 20 nt, Artificial Sequence
  targeting sequence with TTCN PAM
ugcuucagggccuuugcaca

SEQ ID NO: 21276 - RNA, 20 nt, Artificial Sequence
  targeting sequence with TTCN PAM
gggccuuugcacaucuguuc

SEQ ID NO: 21277 - RNA, 20 nt, Artificial Sequence
  targeting sequence with TTCN PAM
auccauguggaugggucugu

SEQ ID NO: 21278 - RNA, 20 nt, Artificial Sequence
  targeting sequence with TTCN PAM
guggagaccuaaaggaugag

SEQ ID NO: 21279 - RNA, 20 nt, Artificial Sequence
  targeting sequence with TTCN PAM
cuaaggaugagauccuucag

SEQ ID NO: 21280 - RNA, 20 nt, Artificial Sequence
  targeting sequence with TTCN PAM
cucaucuaaauuaggucccc

SEQ ID NO: 21281 - RNA, 20 nt, Artificial Sequence
  targeting sequence with TTCN PAM
gucagacaaaaggaguacau

SEQ ID NO: 21282 - RNA, 20 nt, Artificial Sequence
  targeting sequence with TTCN PAM
cggccaggaauagauuuuaa

SEQ ID NO: 21283 - RNA, 20 nt, Artificial Sequence
  targeting sequence with TTCN PAM
uggccgggaacaguggcuca

SEQ ID NO: 21284 - RNA, 20 nt, Artificial Sequence
  targeting sequence with TTCN PAM
cacuauaaaaaaauaaguau

SEQ ID NO: 21285 - RNA, 20 nt, Artificial Sequence
  targeting sequence with TTCN PAM
ccaguuauucucuuucauag

SEQ ID NO: 21286 - RNA, 20 nt, Artificial Sequence
  targeting sequence with TTCN PAM
cuuucauaggauccgugucu

SEQ ID NO: 21287 - RNA, 20 nt, Artificial Sequence
  targeting sequence with TTCN PAM
uaggauccgugucuuaccau

SEQ ID NO: 21288 - RNA, 20 nt, Artificial Sequence
  targeting sequence with TTCN PAM
uuaagguaccuaguaagugu

SEQ ID NO: 21289 - RNA, 20 nt, Artificial Sequence
  targeting sequence with TTCN PAM
aaagaauucucucugggaaa

SEQ ID NO: 21290 - RNA, 20 nt, Artificial Sequence
  targeting sequence with TTCN PAM
uuagaaaacuaguucuuuaa

SEQ ID NO: 21291 - RNA, 20 nt, Artificial Sequence
  targeting sequence with TTCN PAM
cucugggaaaugcugguuua

SEQ ID NO: 21292 - RNA, 20 nt, Artificial Sequence
  targeting sequence with TTCN PAM
cagagagaauucuuuagaaa

SEQ ID NO: 21293 - RNA, 20 nt, Artificial Sequence
  targeting sequence with TTCN PAM
auuuuacaaacacuuuuagg

SEQ ID NO: 21294 - RNA, 20 nt, Artificial Sequence
  targeting sequence with TTCN PAM
ggaucagcugacaaaagcgu

SEQ ID NO: 21295 - RNA, 20 nt, Artificial Sequence
  targeting sequence with TTCN PAM
aguuuugauguccagauaau

SEQ ID NO: 21296 - RNA, 20 nt, Artificial Sequence
  targeting sequence with TTCN PAM
gaaguacacguaaguaacuu

SEQ ID NO: 21297 - RNA, 20 nt, Artificial Sequence
  targeting sequence with TTCN PAM
gaaugccuuccaguuuugau

SEQ ID NO: 21298 - RNA, 20 nt, Artificial Sequence
  targeting sequence with TTCN PAM
auuuaagagaaaaaaguuuu

SEQ ID NO: 21299 - RNA, 20 nt, Artificial Sequence
  targeting sequence with TTCN PAM
aguucaauuuaagagaaaaa

SEQ ID NO: 21300 - RNA, 20 nt, Artificial Sequence
  targeting sequence with TTCN PAM
uauaccaaccacacacaccc

SEQ ID NO: 21301 - RNA, 20 nt, Artificial Sequence
  targeting sequence with TTCN PAM
cuacucaaccuuccuauacc

SEQ ID NO: 21302 - RNA, 20 nt, Artificial Sequence
  targeting sequence with TTCN PAM
uuaacuuauucacuacucaa

SEQ ID NO: 21303 - RNA, 20 nt, Artificial Sequence
  targeting sequence with TTCN PAM
uggccacuuacuggcguggc

SEQ ID NO: 21304 - RNA, 20 nt, Artificial Sequence
  targeting sequence with TTCN PAM
ucugacauuguagacuuuau

SEQ ID NO: 21305 - RNA, 20 nt, Artificial Sequence
  targeting sequence with TTCN PAM
agugucccugucucagagaa

SEQ ID NO: 21306 - RNA, 20 nt, Artificial Sequence
  targeting sequence with TTCN PAM
cugagacagggacacuggaa

SEQ ID NO: 21307 - RNA, 20 nt, Artificial Sequence
  targeting sequence with TTCN PAM
gacauuugacacugggugga

SEQ ID NO: 21308 - RNA, 20 nt, Artificial Sequence
  targeting sequence with TTCN PAM
auaagaacagauacugcauc

SEQ ID NO: 21309 - RNA, 20 nt, Artificial Sequence
  targeting sequence with TTCN PAM
uauggaacuuacaggccgau

SEQ ID NO: 21310 - RNA, 20 nt, Artificial Sequence
  targeting sequence with TTCN PAM
gucuugcucugucucccagg

SEQ ID NO: 21311 - RNA, 20 nt, Artificial Sequence
  targeting sequence with TTCN PAM
aggcucaaauaauccucuua

SEQ ID NO: 21312 - RNA, 20 nt, Artificial Sequence
  targeting sequence with TTCN PAM
gcuucccaaauagcuggaac

SEQ ID NO: 21313 - RNA, 20 nt, Artificial Sequence
  targeting sequence with TTCN PAM
caaauagcuggaacugcagg

SEQ ID NO: 21314 - RNA, 20 nt, Artificial Sequence
  targeting sequence with TTCN PAM
agcuauuugggaagcugaag

SEQ ID NO: 21315 - RNA, 20 nt, Artificial Sequence
  targeting sequence with TTCN PAM
ugguagagacaggguuucac

SEQ ID NO: 21316 - RNA, 20 nt, Artificial Sequence
  targeting sequence with TTCN PAM
cuuuguugccuguacugguc

SEQ ID NO: 21317 - RNA, 20 nt, Artificial Sequence
  targeting sequence with TTCN PAM
agaccaguacaggcaacaaa

SEQ ID NO: 21318 - RNA, 20 nt, Artificial Sequence
  targeting sequence with TTCN PAM
gacacaugcuacaacacaga

SEQ ID NO: 21319 - RNA, 20 nt, Artificial Sequence
  targeting sequence with TTCN PAM
guguuguagcaugugucaga

SEQ ID NO: 21320 - RNA, 20 nt, Artificial Sequence
  targeting sequence with TTCN PAM
gacacaugcuacaacacaga

SEQ ID NO: 21321 - RNA, 20 nt, Artificial Sequence
  targeting sequence with TTCN PAM
uuuuuuuucuuuauuauuau

SEQ ID NO: 21322 - RNA, 20 nt, Artificial Sequence
  targeting sequence with TTCN PAM
uuauuauuauuuuuuuuuau

SEQ ID NO: 21323 - RNA, 20 nt, Artificial Sequence
  targeting sequence with TTCN PAM
uaaaaaaaaauaauaauaaa

SEQ ID NO: 21324 - RNA, 20 nt, Artificial Sequence
  targeting sequence with TTCN PAM
cccuuggccgcccaaacugc

SEQ ID NO: 21325 - RNA, 20 nt, Artificial Sequence
  targeting sequence with TTCN PAM
uuccuuuuuaagucugaaua

SEQ ID NO: 21326 - RNA, 20 nt, Artificial Sequence
  targeting sequence with TTCN PAM
uuuuuaagucugaauauuau

SEQ ID NO: 21327 - RNA, 20 nt, Artificial Sequence
  targeting sequence with TTCN PAM
gacuuaaaaaggaaggaagc

SEQ ID NO: 21328 - RNA, 20 nt, Artificial Sequence
  targeting sequence with TTCN PAM
auuguauauauagaccacau

SEQ ID NO: 21329 - RNA, 20 nt, Artificial Sequence
  targeting sequence with TTCN PAM
uuauccauucaucuguugau

SEQ ID NO: 21330 - RNA, 20 nt, Artificial Sequence
  targeting sequence with TTCN PAM
ucuguugauggacacuugug

SEQ ID NO: 21331 - RNA, 20 nt, Artificial Sequence
  targeting sequence with TTCN PAM
gcuucuuagcuauuaugaau

SEQ ID NO: 21332 - RNA, 20 nt, Artificial Sequence
  targeting sequence with TTCN PAM
uagcuauuaugaauaaugcu

SEQ ID NO: 21333 - RNA, 20 nt, Artificial Sequence
  targeting sequence with TTCN PAM
uaauagcuaagaagcagaag

SEQ ID NO: 21334 - RNA, 20 nt, Artificial Sequence
  targeting sequence with TTCN PAM
uagcagcauuauucauaaua

SEQ ID NO: 21335 - RNA, 20 nt, Artificial Sequence
  targeting sequence with TTCN PAM
aaaauuguuuguugauuugu

SEQ ID NO: 21336 - RNA, 20 nt, Artificial Sequence
  targeting sequence with TTCN PAM
uucaaaaauuguuuguugau

SEQ ID NO: 21337 - RNA, 20 nt, Artificial Sequence
  targeting sequence with TTCN PAM
uuccuucaaaaauuguuugu

SEQ ID NO: 21338 - RNA, 20 nt, Artificial Sequence
  targeting sequence with TTCN PAM
uucauuccuucaaaaauugu

SEQ ID NO: 21339 - RNA, 20 nt, Artificial Sequence
  targeting sequence with TTCN PAM
cucauucauucauuccuuca

SEQ ID NO: 21340 - RNA, 20 nt, Artificial Sequence
  targeting sequence with TTCN PAM
cuuguggguaauacuuuacu

SEQ ID NO: 21341 - RNA, 20 nt, Artificial Sequence
  targeting sequence with TTCN PAM
uuguugucuaaggauuuguc

SEQ ID NO: 21342 - RNA, 20 nt, Artificial Sequence
  targeting sequence with TTCN PAM
agaucuuggucugugauguc

SEQ ID NO: 21343 - RNA, 20 nt, Artificial Sequence
  targeting sequence with TTCN PAM
uugcaccuccaucuuccauu

SEQ ID NO: 21344 - RNA, 20 nt, Artificial Sequence
  targeting sequence with TTCN PAM
auuucugggccuccacaaaa

SEQ ID NO: 21345 - RNA, 20 nt, Artificial Sequence
  targeting sequence with TTCN PAM
gggccuccacaaaacaguaa

SEQ ID NO: 21346 - RNA, 20 nt, Artificial Sequence
  targeting sequence with TTCN PAM
aaaccaaccuggccaaaagu

SEQ ID NO: 21347 - RNA, 20 nt, Artificial Sequence
  targeting sequence with TTCN PAM
uauuuguagagauggggacu

SEQ ID NO: 21348 - RNA, 20 nt, Artificial Sequence
  targeting sequence with TTCN PAM
ccucacccacuguuuucuua

SEQ ID NO: 21349 - RNA, 20 nt, Artificial Sequence
  targeting sequence with TTCN PAM
ccuucuccucacccacuguu

SEQ ID NO: 21350 - RNA, 20 nt, Artificial Sequence
  targeting sequence with TTCN PAM
uuaggaguaggagaauuaau

SEQ ID NO: 21351 - RNA, 20 nt, Artificial Sequence
  targeting sequence with TTCN PAM
ccuacuccuaaagaauuaau

SEQ ID NO: 21352 - RNA, 20 nt, Artificial Sequence
  targeting sequence with TTCN PAM
gugcuuuuuguuggucacuu

SEQ ID NO: 21353 - RNA, 20 nt, Artificial Sequence
  targeting sequence with TTCN PAM
gcaagugaccaacaaaaagc

SEQ ID NO: 21354 - RNA, 20 nt, Artificial Sequence
  targeting sequence with TTCN PAM
guuguagccacugaaaucuu

SEQ ID NO: 21355 - RNA, 20 nt, Artificial Sequence
  targeting sequence with TTCN PAM
guggcuacaacugaagauuu

SEQ ID NO: 21356 - RNA, 20 nt, Artificial Sequence
  targeting sequence with TTCN PAM
caggcacaaugaugcuauac

SEQ ID NO: 21357 - RNA, 20 nt, Artificial Sequence
  targeting sequence with TTCN PAM
uccagugacuuugguacguu

SEQ ID NO: 21358 - RNA, 20 nt, Artificial Sequence
  targeting sequence with TTCN PAM
gauuccugauguccuguccu

SEQ ID NO: 21359 - RNA, 20 nt, Artificial Sequence
  targeting sequence with TTCN PAM
ugauguccuguccuggaaua

SEQ ID NO: 21360 - RNA, 20 nt, Artificial Sequence
  targeting sequence with TTCN PAM
aggacaggacaucaggaauc

SEQ ID NO: 21361 - RNA, 20 nt, Artificial Sequence
  targeting sequence with TTCN PAM
guuauuccaggacaggacau

SEQ ID NO: 21362 - RNA, 20 nt, Artificial Sequence
  targeting sequence with TTCN PAM
gaauauggugauuuuauccu

SEQ ID NO: 21363 - RNA, 20 nt, Artificial Sequence
  targeting sequence with TTCN PAM
gaaugcauuuuagcauuuuu

SEQ ID NO: 21364 - RNA, 20 nt, Artificial Sequence
  targeting sequence with TTCN PAM
cuaccuucaauggcugaggg

SEQ ID NO: 21365 - RNA, 20 nt, Artificial Sequence
  targeting sequence with TTCN PAM
auggcugaggggaggcugac

SEQ ID NO: 21366 - RNA, 20 nt, Artificial Sequence
  targeting sequence with TTCN PAM
uuaaauuguguggaaaccaa

SEQ ID NO: 21367 - RNA, 20 nt, Artificial Sequence
  targeting sequence with TTCN PAM
acacaauuuaaagaauaacu

SEQ ID NO: 21368 - RNA, 20 nt, Artificial Sequence
  targeting sequence with TTCN PAM
cugucuugguuuccacacaa

SEQ ID NO: 21369 - RNA, 20 nt, Artificial Sequence
  targeting sequence with TTCN PAM
uguagucucugaugucuuac

SEQ ID NO: 21370 - RNA, 20 nt, Artificial Sequence
  targeting sequence with TTCN PAM
uuugcuggggcccuuccugu

SEQ ID NO: 21371 - RNA, 20 nt, Artificial Sequence
  targeting sequence with TTCN PAM
caaaggcagcaacaccaagu

SEQ ID NO: 21372 - RNA, 20 nt, Artificial Sequence
  targeting sequence with TTCN PAM
cuugguguugcugccucugg

SEQ ID NO: 21373 - RNA, 20 nt, Artificial Sequence
  targeting sequence with TTCN PAM
cagaggcagcaacaccaagg

SEQ ID NO: 21374 - RNA, 20 nt, Artificial Sequence
  targeting sequence with TTCN PAM
cugacucacccuggcagaga

SEQ ID NO: 21375 - RNA, 20 nt, Artificial Sequence
  targeting sequence with TTCN PAM
cauaaacauagauguggguc

SEQ ID NO: 21376 - RNA, 20 nt, Artificial Sequence
  targeting sequence with TTCN PAM
ucacuguugcgguucuacuu

SEQ ID NO: 21377 - RNA, 20 nt, Artificial Sequence
  targeting sequence with TTCN PAM
cuguugcgguucuacuucuu

SEQ ID NO: 21378 - RNA, 20 nt, Artificial Sequence
  targeting sequence with TTCN PAM
acuucuugugcaauuugucg

SEQ ID NO: 21379 - RNA, 20 nt, Artificial Sequence
  targeting sequence with TTCN PAM
ugugcaauuugucgucauua

SEQ ID NO: 21380 - RNA, 20 nt, Artificial Sequence
  targeting sequence with TTCN PAM
gccccucagggaggacagcu

SEQ ID NO: 21381 - RNA, 20 nt, Artificial Sequence
  targeting sequence with TTCN PAM
uccuggccacggucccgugc

SEQ ID NO: 21382 - RNA, 20 nt, Artificial Sequence
  targeting sequence with TTCN PAM
ucccuccacagacauuuuac

SEQ ID NO: 21383 - RNA, 20 nt, Artificial Sequence
  targeting sequence with TTCN PAM
cucccuuccucccuccacag

SEQ ID NO: 21384 - RNA, 20 nt, Artificial Sequence
  targeting sequence with TTCN PAM
auuaaugguugauucuguuu

SEQ ID NO: 21385 - RNA, 20 nt, Artificial Sequence
  targeting sequence with TTCN PAM
guuuucagcucuaucagucu

SEQ ID NO: 21386 - RNA, 20 nt, Artificial Sequence
  targeting sequence with TTCN PAM
gcucuaucagucuguguucg

SEQ ID NO: 21387 - RNA, 20 nt, Artificial Sequence
  targeting sequence with TTCN PAM
uugcuaguggauacaaugaa

SEQ ID NO: 21388 - RNA, 20 nt, Artificial Sequence
  targeting sequence with TTCN PAM
uuguauccacuagcaacgaa

SEQ ID NO: 21389 - RNA, 20 nt, Artificial Sequence
  targeting sequence with TTCN PAM
aguucccuuaucuaaaagga

SEQ ID NO: 21390 - RNA, 20 nt, Artificial Sequence
  targeting sequence with TTCN PAM
cuuaucuaaaaggagcaugc

SEQ ID NO: 21391 - RNA, 20 nt, Artificial Sequence
  targeting sequence with TTCN PAM
gguucugagguucaaaagag

SEQ ID NO: 21392 - RNA, 20 nt, Artificial Sequence
  targeting sequence with TTCN PAM
gagguucaaaagagagaaug

SEQ ID NO: 21393 - RNA, 20 nt, Artificial Sequence
  targeting sequence with TTCN PAM
aaagagagaauggaauugaa

SEQ ID NO: 21394 - RNA, 20 nt, Artificial Sequence
  targeting sequence with TTCN PAM
cucuuuugaaccucagaacc

SEQ ID NO: 21395 - RNA, 20 nt, Artificial Sequence
  targeting sequence with TTCN PAM
auucucucuuuugaaccuca

SEQ ID NO: 21396 - RNA, 20 nt, Artificial Sequence
  targeting sequence with TTCN PAM
auuccauucucucuuuugaa

SEQ ID NO: 21397 - RNA, 20 nt, Artificial Sequence
  targeting sequence with TTCN PAM
ccauguauuuauacaauugg

SEQ ID NO: 21398 - RNA, 20 nt, Artificial Sequence
  targeting sequence with TTCN PAM
ucaugugaagcacuggucug

SEQ ID NO: 21399 - RNA, 20 nt, Artificial Sequence
  targeting sequence with TTCN PAM
ugugaagcacuggucugugu

SEQ ID NO: 21400 - RNA, 20 nt, Artificial Sequence
  targeting sequence with TTCN PAM
caugaagaaaaugcuauaaa

SEQ ID NO: 21401 - RNA, 20 nt, Artificial Sequence
  targeting sequence with TTCN PAM
aguguaagcacacagaccag

SEQ ID NO: 21402 - RNA, 20 nt, Artificial Sequence
  targeting sequence with TTCN PAM
auuuugccuuuuuaauauuc

SEQ ID NO: 21403 - RNA, 20 nt, Artificial Sequence
  targeting sequence with TTCN PAM
ccuaagaccacaagcuccuu

SEQ ID NO: 21404 - RNA, 20 nt, Artificial Sequence
  targeting sequence with TTCN PAM
auaaauacuaguacuuaaua

SEQ ID NO: 21405 - RNA, 20 nt, Artificial Sequence
  targeting sequence with TTCN PAM
aaggauuagaaaugaauuuc

SEQ ID NO: 21406 - RNA, 20 nt, Artificial Sequence
  targeting sequence with TTCN PAM
aauccuuagaacagugccua

SEQ ID NO: 21407 - RNA, 20 nt, Artificial Sequence
  targeting sequence with TTCN PAM
uuucuaauccuuagaacagu

SEQ ID NO: 21408 - RNA, 20 nt, Artificial Sequence
  targeting sequence with TTCN PAM
auuugagcuuuaugacagcc

SEQ ID NO: 21409 - RNA, 20 nt, Artificial Sequence
  targeting sequence with TTCN PAM
cauucccacccuacugauga

SEQ ID NO: 21410 - RNA, 20 nt, Artificial Sequence
  targeting sequence with TTCN PAM
cacccuacugaugaaaaaga

SEQ ID NO: 21411 - RNA, 20 nt, Artificial Sequence
  targeting sequence with TTCN PAM
ucaguagggugggaaugaga

SEQ ID NO: 21412 - RNA, 20 nt, Artificial Sequence
  targeting sequence with TTCN PAM
uccacuuacuagcuaaggga

SEQ ID NO: 21413 - RNA, 20 nt, Artificial Sequence
  targeting sequence with TTCN PAM
gcagugcuuagcagagcagg

SEQ ID NO: 21414 - RNA, 20 nt, Artificial Sequence
  targeting sequence with TTCN PAM
uccugggccuccuucagcag

SEQ ID NO: 21415 - RNA, 20 nt, Artificial Sequence
  targeting sequence with TTCN PAM
uccagcuuggggcuccaggc

SEQ ID NO: 21416 - RNA, 20 nt, Artificial Sequence
  targeting sequence with TTCN PAM
agcuuggggcuccaggcagg

SEQ ID NO: 21417 - RNA, 20 nt, Artificial Sequence
  targeting sequence with TTCN PAM
acuaagccugccuggagccc

SEQ ID NO: 21418 - RNA, 20 nt, Artificial Sequence
  targeting sequence with TTCN PAM
uccaaacauuuugacgugug

SEQ ID NO: 21419 - RNA, 20 nt, Artificial Sequence
  targeting sequence with TTCN PAM
ggaccaggggaaaggcaaaa

SEQ ID NO: 21420 - RNA, 20 nt, Artificial Sequence
  targeting sequence with TTCN PAM
ccugguccagaacgcuuccu

SEQ ID NO: 21421 - RNA, 20 nt, Artificial Sequence
  targeting sequence with TTCN PAM
ugauuguacuucgcaacuug

SEQ ID NO: 21422 - RNA, 20 nt, Artificial Sequence
  targeting sequence with TTCN PAM
caacuuggcaaauagaagaa

SEQ ID NO: 21423 - RNA, 20 nt, Artificial Sequence
  targeting sequence with TTCN PAM
auuugccaaguugcgaagua

SEQ ID NO: 21424 - RNA, 20 nt, Artificial Sequence
  targeting sequence with TTCN PAM
ucuauuugccaaguugcgaa

SEQ ID NO: 21425 - RNA, 20 nt, Artificial Sequence
  targeting sequence with TTCN PAM
uaggucucaaucacaacaca

SEQ ID NO: 21426 - RNA, 20 nt, Artificial Sequence
  targeting sequence with TTCN PAM
uucauaggucucaaucacaa

SEQ ID NO: 21427 - RNA, 20 nt, Artificial Sequence
  targeting sequence with TTCN PAM
gaaagcaucauuguuauuuu

SEQ ID NO: 21428 - RNA, 20 nt, Artificial Sequence
  targeting sequence with TTCN PAM
gaaaaucuaguuuucuuuca

SEQ ID NO: 21429 - RNA, 20 nt, Artificial Sequence
  targeting sequence with TTCN PAM
uuguuuauaacuuugacacu

SEQ ID NO: 21430 - RNA, 20 nt, Artificial Sequence
  targeting sequence with TTCN PAM
uugagagucaaaucccugaa

SEQ ID NO: 21431 - RNA, 20 nt, Artificial Sequence
  targeting sequence with TTCN PAM
gggauuugacucucaaagaa

SEQ ID NO: 21432 - RNA, 20 nt, Artificial Sequence
  targeting sequence with TTCN PAM
agccaacuuuucagggauuu

SEQ ID NO: 21433 - RNA, 20 nt, Artificial Sequence
  targeting sequence with TTCN PAM
ucugaaagaaugauagauuc

SEQ ID NO: 21434 - RNA, 20 nt, Artificial Sequence
  targeting sequence with TTCN PAM
gaaagaaugauagauucaua

SEQ ID NO: 21435 - RNA, 20 nt, Artificial Sequence
  targeting sequence with TTCN PAM
gaagaaaaauaaaauagauu

SEQ ID NO: 21436 - RNA, 20 nt, Artificial Sequence
  targeting sequence with TTCN PAM
uucagaagaaaaauaaaaua

SEQ ID NO: 21437 - RNA, 20 nt, Artificial Sequence
  targeting sequence with TTCN PAM
uaguaaguuacaaagauggu

SEQ ID NO: 21438 - RNA, 20 nt, Artificial Sequence
  targeting sequence with TTCN PAM
ugguaccaucuuuguaacuu

SEQ ID NO: 21439 - RNA, 20 nt, Artificial Sequence
  targeting sequence with TTCN PAM
uccaguuucccccaguggau

SEQ ID NO: 21440 - RNA, 20 nt, Artificial Sequence
  targeting sequence with TTCN PAM
cccaguggauccaucuuaug

SEQ ID NO: 21441 - RNA, 20 nt, Artificial Sequence
  targeting sequence with TTCN PAM
uggucuugauauuguauaau

SEQ ID NO: 21442 - RNA, 20 nt, Artificial Sequence
  targeting sequence with TTCN PAM
guuguuuuaucgcaugugua

SEQ ID NO: 21443 - RNA, 20 nt, Artificial Sequence
  targeting sequence with TTCN PAM
gugucacgcugauggcaauc

SEQ ID NO: 21444 - RNA, 20 nt, Artificial Sequence
  targeting sequence with TTCN PAM
ccauuucuauaauuuuguca

SEQ ID NO: 21445 - RNA, 20 nt, Artificial Sequence
  targeting sequence with TTCN PAM
auaauuuugucauucaagaa

SEQ ID NO: 21446 - RNA, 20 nt, Artificial Sequence
  targeting sequence with TTCN PAM
agaauguuauauaaauggaa

SEQ ID NO: 21447 - RNA, 20 nt, Artificial Sequence
  targeting sequence with TTCN PAM
ugaaugacaaaauuauagaa

SEQ ID NO: 21448 - RNA, 20 nt, Artificial Sequence
  targeting sequence with TTCN PAM
auuuauauaacauucuugaa

SEQ ID NO: 21449 - RNA, 20 nt, Artificial Sequence
  targeting sequence with TTCN PAM
uucagcauaaaauccuggag

SEQ ID NO: 21450 - RNA, 20 nt, Artificial Sequence
  targeting sequence with TTCN PAM
gcauaaaauccuggagaucc

SEQ ID NO: 21451 - RNA, 20 nt, Artificial Sequence
  targeting sequence with TTCN PAM
auuauuuguuccuuuuuauu

SEQ ID NO: 21452 - RNA, 20 nt, Artificial Sequence
  targeting sequence with TTCN PAM
uuuuuauugcuggguaguau

SEQ ID NO: 21453 - RNA, 20 nt, Artificial Sequence
  targeting sequence with TTCN PAM
aaccaauccaucuucuuuua

SEQ ID NO: 21454 - RNA, 20 nt, Artificial Sequence
  targeting sequence with TTCN PAM
uuuauauuauugugcauuga

SEQ ID NO: 21455 - RNA, 20 nt, Artificial Sequence
  targeting sequence with TTCN PAM
augcacaauaauauaaaaga

SEQ ID NO: 21456 - RNA, 20 nt, Artificial Sequence
  targeting sequence with TTCN PAM
ggagaccacaacccuucaau

SEQ ID NO: 21457 - RNA, 20 nt, Artificial Sequence
  targeting sequence with TTCN PAM
guucaggagaccacaacccu

SEQ ID NO: 21458 - RNA, 20 nt, Artificial Sequence
  targeting sequence with TTCN PAM
uucaucuuccacacagacuc

SEQ ID NO: 21459 - RNA, 20 nt, Artificial Sequence
  targeting sequence with TTCN PAM
ucuuccacacagacucucaa

SEQ ID NO: 21460 - RNA, 20 nt, Artificial Sequence
  targeting sequence with TTCN PAM
acacagacucucaaaaucca

SEQ ID NO: 21461 - RNA, 20 nt, Artificial Sequence
  targeting sequence with TTCN PAM
ugcagcagagaaggucuugu

SEQ ID NO: 21462 - RNA, 20 nt, Artificial Sequence
  targeting sequence with TTCN PAM
cugcugcaugaaauaauugg

SEQ ID NO: 21463 - RNA, 20 nt, Artificial Sequence
  targeting sequence with TTCN PAM
uuuuuucuucuuucuucguc

SEQ ID NO: 21464 - RNA, 20 nt, Artificial Sequence
  targeting sequence with TTCN PAM
ucuuucuucgucuccucgau

SEQ ID NO: 21465 - RNA, 20 nt, Artificial Sequence
  targeting sequence with TTCN PAM
uucuucgucuccucgauggg

SEQ ID NO: 21466 - RNA, 20 nt, Artificial Sequence
  targeting sequence with TTCN PAM
ucgucuccucgaugggaaag

SEQ ID NO: 21467 - RNA, 20 nt, Artificial Sequence
  targeting sequence with TTCN PAM
ucuccucgaugggaaagacu

SEQ ID NO: 21468 - RNA, 20 nt, Artificial Sequence
  targeting sequence with TTCN PAM
caucgaggagacgaagaaag

SEQ ID NO: 21469 - RNA, 20 nt, Artificial Sequence
  targeting sequence with TTCN PAM
ugaucaaaggcacaagucuu

SEQ ID NO: 21470 - RNA, 20 nt, Artificial Sequence
  targeting sequence with TTCN PAM
cuuuugcuucaugaucaaag

SEQ ID NO: 21471 - RNA, 20 nt, Artificial Sequence
  targeting sequence with TTCN PAM
ugcaguuacuuagcaacaag

SEQ ID NO: 21472 - RNA, 20 nt, Artificial Sequence
  targeting sequence with TTCN PAM
acaagccuccacucaguaua

SEQ ID NO: 21473 - RNA, 20 nt, Artificial Sequence
  targeting sequence with TTCN PAM
ccacacaugcugccuggaca

SEQ ID NO: 21474 - RNA, 20 nt, Artificial Sequence
  targeting sequence with TTCN PAM
uccccacacaugcugccugg

SEQ ID NO: 21475 - RNA, 20 nt, Artificial Sequence
  targeting sequence with TTCN PAM
cucccacacuuugaugcuag

SEQ ID NO: 21476 - RNA, 20 nt, Artificial Sequence
  targeting sequence with TTCN PAM
ggucuagcaucaaagugugg

SEQ ID NO: 21477 - RNA, 20 nt, Artificial Sequence
  targeting sequence with TTCN PAM
aauucaggucuagcaucaaa

SEQ ID NO: 21478 - RNA, 20 nt, Artificial Sequence
  targeting sequence with TTCN PAM
ggauucuaauucaggucuag

SEQ ID NO: 21479 - RNA, 20 nt, Artificial Sequence
  targeting sequence with TTCN PAM
ugaggucacauggccuguca

SEQ ID NO: 21480 - RNA, 20 nt, Artificial Sequence
  targeting sequence with TTCN PAM
gagcuggagcuuuacguucc

SEQ ID NO: 21481 - RNA, 20 nt, Artificial Sequence
  targeting sequence with TTCN PAM
ucaucugacagauagggaua

SEQ ID NO: 21482 - RNA, 20 nt, Artificial Sequence
  targeting sequence with TTCN PAM
caacaaucucgucaagucag

SEQ ID NO: 21483 - RNA, 20 nt, Artificial Sequence
  targeting sequence with TTCN PAM
ugcuguucagcuucuaggag

SEQ ID NO: 21484 - RNA, 20 nt, Artificial Sequence
  targeting sequence with TTCN PAM
gcuucuaggaguauaucccu

SEQ ID NO: 21485 - RNA, 20 nt, Artificial Sequence
  targeting sequence with TTCN PAM
aggaguauaucccuuccguu

SEQ ID NO: 21486 - RNA, 20 nt, Artificial Sequence
  targeting sequence with TTCN PAM
guucagcaucuguugagcac

SEQ ID NO: 21487 - RNA, 20 nt, Artificial Sequence
  targeting sequence with TTCN PAM
gcaucuguugagcaccuucu

SEQ ID NO: 21488 - RNA, 20 nt, Artificial Sequence
  targeting sequence with TTCN PAM
acaaagcaagcacuguucua

SEQ ID NO: 21489 - RNA, 20 nt, Artificial Sequence
  targeting sequence with TTCN PAM
agggguuggaagacaccaag

SEQ ID NO: 21490 - RNA, 20 nt, Artificial Sequence
  targeting sequence with TTCN PAM
aaccccuagaacagugcuug

SEQ ID NO: 21491 - RNA, 20 nt, Artificial Sequence
  targeting sequence with TTCN PAM
uaaggugcucuuuaaguggg

SEQ ID NO: 21492 - RNA, 20 nt, Artificial Sequence
  targeting sequence with TTCN PAM
cacucuccaucucaaucccc

SEQ ID NO: 21493 - RNA, 20 nt, Artificial Sequence
  targeting sequence with TTCN PAM
gagcucccccagcccucugu

SEQ ID NO: 21494 - RNA, 20 nt, Artificial Sequence
  targeting sequence with TTCN PAM
augggaucaucagcauacgg

SEQ ID NO: 21495 - RNA, 20 nt, Artificial Sequence
  targeting sequence with TTCN PAM
guaugcugaugaucccauug

SEQ ID NO: 21496 - RNA, 20 nt, Artificial Sequence
  targeting sequence with TTCN PAM
ccucgccauuuuuguuccgu

SEQ ID NO: 21497 - RNA, 20 nt, Artificial Sequence
  targeting sequence with TTCN PAM
agcagauggaccauauuggc

SEQ ID NO: 21498 - RNA, 20 nt, Artificial Sequence
  targeting sequence with TTCN PAM
agguacucuuaaaguugucc

SEQ ID NO: 21499 - RNA, 20 nt, Artificial Sequence
  targeting sequence with TTCN PAM
agaacaaacaccaucaugaa

SEQ ID NO: 21500 - RNA, 20 nt, Artificial Sequence
  targeting sequence with TTCN PAM
agaaggaggacaacuuuaag

SEQ ID NO: 21501 - RNA, 20 nt, Artificial Sequence
  targeting sequence with TTCN PAM
cagguagcgggacuauuaaa

SEQ ID NO: 21502 - RNA, 20 nt, Artificial Sequence
  targeting sequence with TTCN PAM
auacauucucagguagcggg

SEQ ID NO: 21503 - RNA, 20 nt, Artificial Sequence
  targeting sequence with TTCN PAM
uaaacucaacuuuugaggag

SEQ ID NO: 21504 - RNA, 20 nt, Artificial Sequence
  targeting sequence with TTCN PAM
uuccuaaacucaacuuuuga

SEQ ID NO: 21505 - RNA, 20 nt, Artificial Sequence
  targeting sequence with TTCN PAM
uaaggaaaugguccugcugc

SEQ ID NO: 21506 - RNA, 20 nt, Artificial Sequence
  targeting sequence with TTCN PAM
uuuuuuaguucuucccucca

SEQ ID NO: 21507 - RNA, 20 nt, Artificial Sequence
  targeting sequence with TTCN PAM
ucccuccaaguuugggcaga

SEQ ID NO: 21508 - RNA, 20 nt, Artificial Sequence
  targeting sequence with TTCN PAM
cuccaaguuugggcagaaua

SEQ ID NO: 21509 - RNA, 20 nt, Artificial Sequence
  targeting sequence with TTCN PAM
gcccaaacuuggagggaaga

SEQ ID NO: 21510 - RNA, 20 nt, Artificial Sequence
  targeting sequence with TTCN PAM
ugagccuuuuuuugcccuug

SEQ ID NO: 21511 - RNA, 20 nt, Artificial Sequence
  targeting sequence with TTCN PAM
gacaagggcaaaaaaaggcu

SEQ ID NO: 21512 - RNA, 20 nt, Artificial Sequence
  targeting sequence with TTCN PAM
uaaauuuuauacacacuuug

SEQ ID NO: 21513 - RNA, 20 nt, Artificial Sequence
  targeting sequence with TTCN PAM
auguccaugugacuuugaga

SEQ ID NO: 21514 - RNA, 20 nt, Artificial Sequence
  targeting sequence with TTCN PAM
uuuacccucagaggacucug

SEQ ID NO: 21515 - RNA, 20 nt, Artificial Sequence
  targeting sequence with TTCN PAM
aaaucaaguaggcaaccauc

SEQ ID NO: 21516 - RNA, 20 nt, Artificial Sequence
  targeting sequence with TTCN PAM
aaacaaccuucuaaaucaag

SEQ ID NO: 21517 - RNA, 20 nt, Artificial Sequence
  targeting sequence with TTCN PAM
uccugaauaauuuuuuuugg

SEQ ID NO: 21518 - RNA, 20 nt, Artificial Sequence
  targeting sequence with TTCN PAM
ugaauaauuuuuuuuggccc

SEQ ID NO: 21519 - RNA, 20 nt, Artificial Sequence
  targeting sequence with TTCN PAM
ggaagaagcauaauaaccuu

SEQ ID NO: 21520 - RNA, 20 nt, Artificial Sequence
  targeting sequence with TTCN PAM
ugcuguuugauuuguggcug

SEQ ID NO: 21521 - RNA, 20 nt, Artificial Sequence
  targeting sequence with TTCN PAM
ugagaagcaggaggcccugu

SEQ ID NO: 21522 - RNA, 20 nt, Artificial Sequence
  targeting sequence with TTCN PAM
caugaauuaaaaaugguagc

SEQ ID NO: 21523 - RNA, 20 nt, Artificial Sequence
  targeting sequence with TTCN PAM
gaggcuccuuuuauuuuuua

SEQ ID NO: 21524 - RNA, 20 nt, Artificial Sequence
  targeting sequence with TTCN PAM
uuuuuuuuuuuuuuuuuuuu

SEQ ID NO: 21525 - RNA, 20 nt, Artificial Sequence
  targeting sequence with TTCN PAM
agcaauccucucaccucagc

SEQ ID NO: 21526 - RNA, 20 nt, Artificial Sequence
  targeting sequence with TTCN PAM
ccauguuggccaggcugguc

SEQ ID NO: 21527 - RNA, 20 nt, Artificial Sequence
  targeting sequence with TTCN PAM
agaccagccuggccaacaug

SEQ ID NO: 21528 - RNA, 20 nt, Artificial Sequence
  targeting sequence with TTCN PAM
cuugccucggccuccugaag

SEQ ID NO: 21529 - RNA, 20 nt, Artificial Sequence
  targeting sequence with TTCN PAM
ggaggccgaggcaagugaau

SEQ ID NO: 21530 - RNA, 20 nt, Artificial Sequence
  targeting sequence with TTCN PAM
aggcaauguaauuuugaaca

SEQ ID NO: 21531 - RNA, 20 nt, Artificial Sequence
  targeting sequence with TTCN PAM
aaauuacauugccuagaacu

SEQ ID NO: 21532 - RNA, 20 nt, Artificial Sequence
  targeting sequence with TTCN PAM
ggaugaacagagagaaugag

SEQ ID NO: 21533 - RNA, 20 nt, Artificial Sequence
  targeting sequence with TTCN PAM
uccagaaacucucccaucgg

SEQ ID NO: 21534 - RNA, 20 nt, Artificial Sequence
  targeting sequence with TTCN PAM
cucuguucauccagaaacuc

SEQ ID NO: 21535 - RNA, 20 nt, Artificial Sequence
  targeting sequence with TTCN PAM
ggaaaucccuuccacucuga

SEQ ID NO: 21536 - RNA, 20 nt, Artificial Sequence
  targeting sequence with TTCN PAM
ugaauauaucuguugacaau

SEQ ID NO: 21537 - RNA, 20 nt, Artificial Sequence
  targeting sequence with TTCN PAM
acucugaagucagcagugua

SEQ ID NO: 21538 - RNA, 20 nt, Artificial Sequence
  targeting sequence with TTCN PAM
gaguggaagggauuuccuga

SEQ ID NO: 21539 - RNA, 20 nt, Artificial Sequence
  targeting sequence with TTCN PAM
uccucugccucacuacccug

SEQ ID NO: 21540 - RNA, 20 nt, Artificial Sequence
  targeting sequence with TTCN PAM
uccuccucugccucacuacc

SEQ ID NO: 21541 - RNA, 20 nt, Artificial Sequence
  targeting sequence with TTCN PAM
ucugguucuuccuccucugc

SEQ ID NO: 21542 - RNA, 20 nt, Artificial Sequence
  targeting sequence with TTCN PAM
cacucacugggacacacuca

SEQ ID NO: 21543 - RNA, 20 nt, Artificial Sequence
  targeting sequence with TTCN PAM
gguaagggcccaggccccac

SEQ ID NO: 21544 - RNA, 20 nt, Artificial Sequence
  targeting sequence with TTCN PAM
cacaggaucacuuuauaccc

SEQ ID NO: 21545 - RNA, 20 nt, Artificial Sequence
  targeting sequence with TTCN PAM
uauaguuucucacaggauca

SEQ ID NO: 21546 - RNA, 20 nt, Artificial Sequence
  targeting sequence with TTCN PAM
guauuuccuauaguuucuca

SEQ ID NO: 21547 - RNA, 20 nt, Artificial Sequence
  targeting sequence with TTCN PAM
ccuuuagucuuuucaguauu

SEQ ID NO: 21548 - RNA, 20 nt, Artificial Sequence
  targeting sequence with TTCN PAM
acuuuucugauaaaacccca

SEQ ID NO: 21549 - RNA, 20 nt, Artificial Sequence
  targeting sequence with TTCN PAM
gauaaaaccccauccccuga

SEQ ID NO: 21550 - RNA, 20 nt, Artificial Sequence
  targeting sequence with TTCN PAM
ucucuucaguugagauugcc

SEQ ID NO: 21551 - RNA, 20 nt, Artificial Sequence
  targeting sequence with TTCN PAM
cuucaguugagauugccugu

SEQ ID NO: 21552 - RNA, 20 nt, Artificial Sequence
  targeting sequence with TTCN PAM
guugagauugccuguaggga

SEQ ID NO: 21553 - RNA, 20 nt, Artificial Sequence
  targeting sequence with TTCN PAM
cuacaggcaaucucaacuga

SEQ ID NO: 21554 - RNA, 20 nt, Artificial Sequence
  targeting sequence with TTCN PAM
ccacucuggccugcccaugu

SEQ ID NO: 21555 - RNA, 20 nt, Artificial Sequence
  targeting sequence with TTCN PAM
aaacuguuuuacauaguacc

SEQ ID NO: 21556 - RNA, 20 nt, Artificial Sequence
  targeting sequence with TTCN PAM
uuggaagaaucccacccuga

SEQ ID NO: 21557 - RNA, 20 nt, Artificial Sequence
  targeting sequence with TTCN PAM
aaggaaacucagguacuaug

SEQ ID NO: 21558 - RNA, 20 nt, Artificial Sequence
  targeting sequence with TTCN PAM
uccaaggaaacucagguacu

SEQ ID NO: 21559 - RNA, 20 nt, Artificial Sequence
  targeting sequence with TTCN PAM
cagcccccaugaccucaggg

SEQ ID NO: 21560 - RNA, 20 nt, Artificial Sequence
  targeting sequence with TTCN PAM
uccuuuacugguccccacuu

SEQ ID NO: 21561 - RNA, 20 nt, Artificial Sequence
  targeting sequence with TTCN PAM
acaugaguuuuuguuucaua

SEQ ID NO: 21562 - RNA, 20 nt, Artificial Sequence
  targeting sequence with TTCN PAM
uaaagaauccuacugcccca

SEQ ID NO: 21563 - RNA, 20 nt, Artificial Sequence
  targeting sequence with TTCN PAM
uuaugaaacaaaaacucaug

SEQ ID NO: 21564 - RNA, 20 nt, Artificial Sequence
  targeting sequence with TTCN PAM
acccccuuuuaccuccuggg

SEQ ID NO: 21565 - RNA, 20 nt, Artificial Sequence
  targeting sequence with TTCN PAM
cuuaguuuuggguuagugcc

SEQ ID NO: 21566 - RNA, 20 nt, Artificial Sequence
  targeting sequence with TTCN PAM
gaucccagugucuuguggua

SEQ ID NO: 21567 - RNA, 20 nt, Artificial Sequence
  targeting sequence with TTCN PAM
agcuuuucugaucccagugu

SEQ ID NO: 21568 - RNA, 20 nt, Artificial Sequence
  targeting sequence with TTCN PAM
uagcccuugaggcugggucu

SEQ ID NO: 21569 - RNA, 20 nt, Artificial Sequence
  targeting sequence with TTCN PAM
uuuuuuuuuuugugacagag

SEQ ID NO: 21570 - RNA, 20 nt, Artificial Sequence
  targeting sequence with TTCN PAM
gccucccggguucuaagcga

SEQ ID NO: 21571 - RNA, 20 nt, Artificial Sequence
  targeting sequence with TTCN PAM
aagcgauucuugugccucag

SEQ ID NO: 21572 - RNA, 20 nt, Artificial Sequence
  targeting sequence with TTCN PAM
ugugccucagccucuggaau

SEQ ID NO: 21573 - RNA, 20 nt, Artificial Sequence
  targeting sequence with TTCN PAM
agaggcugaggcacaagaau

SEQ ID NO: 21574 - RNA, 20 nt, Artificial Sequence
  targeting sequence with TTCN PAM
gcguggugucgcgugucugu

SEQ ID NO: 21575 - RNA, 20 nt, Artificial Sequence
  targeting sequence with TTCN PAM
guaaagauaggguuucccca

SEQ ID NO: 21576 - RNA, 20 nt, Artificial Sequence
  targeting sequence with TTCN PAM
ccauguuggccaggcugguc

SEQ ID NO: 21577 - RNA, 20 nt, Artificial Sequence
  targeting sequence with TTCN PAM
agaccagccuggccaacaug

SEQ ID NO: 21578 - RNA, 20 nt, Artificial Sequence
  targeting sequence with TTCN PAM
agcacuuugggagguugagg

SEQ ID NO: 21579 - RNA, 20 nt, Artificial Sequence
  targeting sequence with TTCN PAM
cuugaacuagauucccaggu

SEQ ID NO: 21580 - RNA, 20 nt, Artificial Sequence
  targeting sequence with TTCN PAM
agagaaaagcggcagcccgu

SEQ ID NO: 21581 - RNA, 20 nt, Artificial Sequence
  targeting sequence with TTCN PAM
cagguagcuugcucuccagc

SEQ ID NO: 21582 - RNA, 20 nt, Artificial Sequence
  targeting sequence with TTCN PAM
ccugugugcugguccuacag

SEQ ID NO: 21583 - RNA, 20 nt, Artificial Sequence
  targeting sequence with TTCN PAM
caguuucaaagacaguuguu

SEQ ID NO: 21584 - RNA, 20 nt, Artificial Sequence
  targeting sequence with TTCN PAM
aagacaguuguuuguuuuca

SEQ ID NO: 21585 - RNA, 20 nt, Artificial Sequence
  targeting sequence with TTCN PAM
gagcccauugcucuuuuuug

SEQ ID NO: 21586 - RNA, 20 nt, Artificial Sequence
  targeting sequence with TTCN PAM
aaaaagagcaaugggcucug

SEQ ID NO: 21587 - RNA, 20 nt, Artificial Sequence
  targeting sequence with TTCN PAM
gucagaaaccauuucaccug

SEQ ID NO: 21588 - RNA, 20 nt, Artificial Sequence
  targeting sequence with TTCN PAM
gacugaaucuaauuuucaaa

SEQ ID NO: 21589 - RNA, 20 nt, Artificial Sequence
  targeting sequence with TTCN PAM
ccugugcaaggacccccgcc

SEQ ID NO: 21590 - RNA, 20 nt, Artificial Sequence
  targeting sequence with TTCN PAM
ccugcaggcggggguccuug

SEQ ID NO: 21591 - RNA, 20 nt, Artificial Sequence
  targeting sequence with TTCN PAM
uucuucaggaagagcaagca

SEQ ID NO: 21592 - RNA, 20 nt, Artificial Sequence
  targeting sequence with TTCN PAM
ucaggaagagcaagcaaguu

SEQ ID NO: 21593 - RNA, 20 nt, Artificial Sequence
  targeting sequence with TTCN PAM
ggaagagcaagcaaguuucc

SEQ ID NO: 21594 - RNA, 20 nt, Artificial Sequence
  targeting sequence with TTCN PAM
ugaagaaagaaaauuaacac

SEQ ID NO: 21595 - RNA, 20 nt, Artificial Sequence
  targeting sequence with TTCN PAM
cuucuauuaaaaaaugucuu

SEQ ID NO: 21596 - RNA, 20 nt, Artificial Sequence
  targeting sequence with TTCN PAM
auuaaaaaaugucuuugugc

SEQ ID NO: 21597 - RNA, 20 nt, Artificial Sequence
  targeting sequence with TTCN PAM
cugccaucuccccacauuuu

SEQ ID NO: 21598 - RNA, 20 nt, Artificial Sequence
  targeting sequence with TTCN PAM
aguauguaagagaaaagcag

SEQ ID NO: 21599 - RNA, 20 nt, Artificial Sequence
  targeting sequence with TTCN PAM
cuuacauacuagaaaaugug

SEQ ID NO: 21600 - RNA, 20 nt, Artificial Sequence
  targeting sequence with TTCN PAM
gagcuuacuggggagcaaca

SEQ ID NO: 21601 - RNA, 20 nt, Artificial Sequence
  targeting sequence with TTCN PAM
ucagcugcagcagugucccc

SEQ ID NO: 21602 - RNA, 20 nt, Artificial Sequence
  targeting sequence with TTCN PAM
gcugcagcaguguccccagc

SEQ ID NO: 21603 - RNA, 20 nt, Artificial Sequence
  targeting sequence with TTCN PAM
cugaguccccugcuaugacc

SEQ ID NO: 21604 - RNA, 20 nt, Artificial Sequence
  targeting sequence with TTCN PAM
ugggaucugcuguuucacug

SEQ ID NO: 21605 - RNA, 20 nt, Artificial Sequence
  targeting sequence with TTCN PAM
gccuuccugggaucugcugu

SEQ ID NO: 21606 - RNA, 20 nt, Artificial Sequence
  targeting sequence with TTCN PAM
ucccguaagacugauugaug

SEQ ID NO: 21607 - RNA, 20 nt, Artificial Sequence
  targeting sequence with TTCN PAM
guaaagcuguacaacauuug

SEQ ID NO: 21608 - RNA, 20 nt, Artificial Sequence
  targeting sequence with TTCN PAM
uuguuccuguuguuuaagcc

SEQ ID NO: 21609 - RNA, 20 nt, Artificial Sequence
  targeting sequence with TTCN PAM
uguuguuuaagcccuuagag

SEQ ID NO: 21610 - RNA, 20 nt, Artificial Sequence
  targeting sequence with TTCN PAM
uaaccucuuuuaucuucugu

SEQ ID NO: 21611 - RNA, 20 nt, Artificial Sequence
  targeting sequence with TTCN PAM
guugauuagagaggaacgua

SEQ ID NO: 21612 - RNA, 20 nt, Artificial Sequence
  targeting sequence with TTCN PAM
ucucuaaucaacagaagaua

SEQ ID NO: 21613 - RNA, 20 nt, Artificial Sequence
  targeting sequence with TTCN PAM
guccccagucagccacagcc

SEQ ID NO: 21614 - RNA, 20 nt, Artificial Sequence
  targeting sequence with TTCN PAM
uucuaccagcugaguggaaa

SEQ ID NO: 21615 - RNA, 20 nt, Artificial Sequence
  targeting sequence with TTCN PAM
accagcugaguggaaaacag

SEQ ID NO: 21616 - RNA, 20 nt, Artificial Sequence
  targeting sequence with TTCN PAM
acucagcugguagaaggaaa

SEQ ID NO: 21617 - RNA, 20 nt, Artificial Sequence
  targeting sequence with TTCN PAM
uuuucugagauucuguuacu

SEQ ID NO: 21618 - RNA, 20 nt, Artificial Sequence
  targeting sequence with TTCN PAM
gagauucuguuacuauuaau

SEQ ID NO: 21619 - RNA, 20 nt, Artificial Sequence
  targeting sequence with TTCN PAM
guuacuauuaauuauacauu

SEQ ID NO: 21620 - RNA, 20 nt, Artificial Sequence
  targeting sequence with TTCN PAM
caauguccuuagccuaacuc

SEQ ID NO: 21621 - RNA, 20 nt, Artificial Sequence
  targeting sequence with TTCN PAM
ggcagaaaaaaaaauagcau

SEQ ID NO: 21622 - RNA, 20 nt, Artificial Sequence
  targeting sequence with TTCN PAM
gccugaaacaccauucccaa

SEQ ID NO: 21623 - RNA, 20 nt, Artificial Sequence
  targeting sequence with TTCN PAM
uuccugccuugauacaugcu

SEQ ID NO: 21624 - RNA, 20 nt, Artificial Sequence
  targeting sequence with TTCN PAM
uuccuuccugccuugauaca

SEQ ID NO: 21625 - RNA, 20 nt, Artificial Sequence
  targeting sequence with TTCN PAM
gagaauggugaguuguacag

SEQ ID NO: 21626 - RNA, 20 nt, Artificial Sequence
  targeting sequence with TTCN PAM
cugaacugucauauauuuuc

SEQ ID NO: 21627 - RNA, 20 nt, Artificial Sequence
  targeting sequence with TTCN PAM
ggucacaaacucugagaugc

SEQ ID NO: 21628 - RNA, 20 nt, Artificial Sequence
  targeting sequence with TTCN PAM
gcucuguuuucaggucacaa

SEQ ID NO: 21629 - RNA, 20 nt, Artificial Sequence
  targeting sequence with TTCN PAM
ucuucagcucuguuuucagg

SEQ ID NO: 21630 - RNA, 20 nt, Artificial Sequence
  targeting sequence with TTCN PAM
cacuacucagguccuuuaua

SEQ ID NO: 21631 - RNA, 20 nt, Artificial Sequence
  targeting sequence with TTCN PAM
uauucacacuacucaggucc

SEQ ID NO: 21632 - RNA, 20 nt, Artificial Sequence
  targeting sequence with TTCN PAM
aacuucuuauucacacuacu

SEQ ID NO: 21633 - RNA, 20 nt, Artificial Sequence
  targeting sequence with TTCN PAM
gaagaauaacuuguuuccau

SEQ ID NO: 21634 - RNA, 20 nt, Artificial Sequence
  targeting sequence with TTCN PAM
gaagcaagaaucugugaugc

SEQ ID NO: 21635 - RNA, 20 nt, Artificial Sequence
  targeting sequence with TTCN PAM
ucugaagcaagaaucuguga

SEQ ID NO: 21636 - RNA, 20 nt, Artificial Sequence
  targeting sequence with TTCN PAM
auggaggguggauuaaaaua

SEQ ID NO: 21637 - RNA, 20 nt, Artificial Sequence
  targeting sequence with TTCN PAM
ugccuacuaauaagucaucc

SEQ ID NO: 21638 - RNA, 20 nt, Artificial Sequence
  targeting sequence with TTCN PAM
cucuuacaugacauguuuug

SEQ ID NO: 21639 - RNA, 20 nt, Artificial Sequence
  targeting sequence with TTCN PAM
ucuaccccugccuuaccauu

SEQ ID NO: 21640 - RNA, 20 nt, Artificial Sequence
  targeting sequence with TTCN PAM
accccugccuuaccauuggu

SEQ ID NO: 21641 - RNA, 20 nt, Artificial Sequence
  targeting sequence with TTCN PAM
uuuguauucgaguaaagaaa

SEQ ID NO: 21642 - RNA, 20 nt, Artificial Sequence
  targeting sequence with TTCN PAM
uuaucugcucccuuuaucuu

SEQ ID NO: 21643 - RNA, 20 nt, Artificial Sequence
  targeting sequence with TTCN PAM
caguuucccauggcugauuu

SEQ ID NO: 21644 - RNA, 20 nt, Artificial Sequence
  targeting sequence with TTCN PAM
cauggcugauuuccuaaaac

SEQ ID NO: 21645 - RNA, 20 nt, Artificial Sequence
  targeting sequence with TTCN PAM
uaaaacucucauuuuaauua

SEQ ID NO: 21646 - RNA, 20 nt, Artificial Sequence
  targeting sequence with TTCN PAM
cuggcccucucuauucaucu

SEQ ID NO: 21647 - RNA, 20 nt, Artificial Sequence
  targeting sequence with TTCN PAM
ucugcuuaauguguguacau

SEQ ID NO: 21648 - RNA, 20 nt, Artificial Sequence
  targeting sequence with TTCN PAM
acagauacuuauuggcacac

SEQ ID NO: 21649 - RNA, 20 nt, Artificial Sequence
  targeting sequence with TTCN PAM
ugcugggugucuucccuucc

SEQ ID NO: 21650 - RNA, 20 nt, Artificial Sequence
  targeting sequence with TTCN PAM
cuucccaaucuaggaagauu

SEQ ID NO: 21651 - RNA, 20 nt, Artificial Sequence
  targeting sequence with TTCN PAM
caaucuaggaagauuuagaa

SEQ ID NO: 21652 - RNA, 20 nt, Artificial Sequence
  targeting sequence with TTCN PAM
uagauugggaagggaagaca

SEQ ID NO: 21653 - RNA, 20 nt, Artificial Sequence
  targeting sequence with TTCN PAM
aaaucuuccuagauugggaa

SEQ ID NO: 21654 - RNA, 20 nt, Artificial Sequence
  targeting sequence with TTCN PAM
auauaggaugaugaaguaaa

SEQ ID NO: 21655 - RNA, 20 nt, Artificial Sequence
  targeting sequence with TTCN PAM
ucauccuauauugaauucua

SEQ ID NO: 21656 - RNA, 20 nt, Artificial Sequence
  targeting sequence with TTCN PAM
aaugacaaaaauacacaaau

SEQ ID NO: 21657 - RNA, 20 nt, Artificial Sequence
  targeting sequence with TTCN PAM
gcaggguggaccacagacua

SEQ ID NO: 21658 - RNA, 20 nt, Artificial Sequence
  targeting sequence with TTCN PAM
ggcaccaguaugccuggguu

SEQ ID NO: 21659 - RNA, 20 nt, Artificial Sequence
  targeting sequence with TTCN PAM
aauauggauucuggcaccag

SEQ ID NO: 21660 - RNA, 20 nt, Artificial Sequence
  targeting sequence with TTCN PAM
aaaguuguauugaguaauuu

SEQ ID NO: 21661 - RNA, 20 nt, Artificial Sequence
  targeting sequence with TTCN PAM
gauuuuaaguggaaagauaa

SEQ ID NO: 21662 - RNA, 20 nt, Artificial Sequence
  targeting sequence with TTCN PAM
acuuaaaaucagaaguaggc

SEQ ID NO: 21663 - RNA, 20 nt, Artificial Sequence
  targeting sequence with TTCN PAM
uaucuuuccacuuaaaauca

SEQ ID NO: 21664 - RNA, 20 nt, Artificial Sequence
  targeting sequence with TTCN PAM
uaagcaauauuggaaugcuu

SEQ ID NO: 21665 - RNA, 20 nt, Artificial Sequence
  targeting sequence with TTCN PAM
aaaagcucagugaacaccaa

SEQ ID NO: 21666 - RNA, 20 nt, Artificial Sequence
  targeting sequence with TTCN PAM
gucuuucaccaaaugugaaa

SEQ ID NO: 21667 - RNA, 20 nt, Artificial Sequence
  targeting sequence with TTCN PAM
ccaaaugugaaaacauuuug

SEQ ID NO: 21668 - RNA, 20 nt, Artificial Sequence
  targeting sequence with TTCN PAM
cauuuggugaaagacagaac

SEQ ID NO: 21669 - RNA, 20 nt, Artificial Sequence
  targeting sequence with TTCN PAM
ugaaauauuucuucuucucc

SEQ ID NO: 21670 - RNA, 20 nt, Artificial Sequence
  targeting sequence with TTCN PAM
agaaaucauggccaaaaugu

SEQ ID NO: 21671 - RNA, 20 nt, Artificial Sequence
  targeting sequence with TTCN PAM
ucuucuccauucuuuccuuu

SEQ ID NO: 21672 - RNA, 20 nt, Artificial Sequence
  targeting sequence with TTCN PAM
ucuccauucuuuccuuuccu

SEQ ID NO: 21673 - RNA, 20 nt, Artificial Sequence
  targeting sequence with TTCN PAM
ccauucuuuccuuuccucug

SEQ ID NO: 21674 - RNA, 20 nt, Artificial Sequence
  targeting sequence with TTCN PAM
uuccuuuccucuggaacucu

SEQ ID NO: 21675 - RNA, 20 nt, Artificial Sequence
  targeting sequence with TTCN PAM
uuuccucuggaacucuaauu

SEQ ID NO: 21676 - RNA, 20 nt, Artificial Sequence
  targeting sequence with TTCN PAM
ucuggaacucuaauuacacu

SEQ ID NO: 21677 - RNA, 20 nt, Artificial Sequence
  targeting sequence with TTCN PAM
agaggaaaggaaagaaugga

SEQ ID NO: 21678 - RNA, 20 nt, Artificial Sequence
  targeting sequence with TTCN PAM
aggguuuccagauauucagu

SEQ ID NO: 21679 - RNA, 20 nt, Artificial Sequence
  targeting sequence with TTCN PAM
agauauucaguggaguuuau

SEQ ID NO: 21680 - RNA, 20 nt, Artificial Sequence
  targeting sequence with TTCN PAM
guggaguuuaugugcagaau

SEQ ID NO: 21681 - RNA, 20 nt, Artificial Sequence
  targeting sequence with TTCN PAM
gcacauaaacuccacugaau

SEQ ID NO: 21682 - RNA, 20 nt, Artificial Sequence
  targeting sequence with TTCN PAM
uuuccuguauaggaauuuca

SEQ ID NO: 21683 - RNA, 20 nt, Artificial Sequence
  targeting sequence with TTCN PAM
aauuuccuuuccuguauagg

SEQ ID NO: 21684 - RNA, 20 nt, Artificial Sequence
  targeting sequence with TTCN PAM
cuuacaccaauuuaaacugc

SEQ ID NO: 21685 - RNA, 20 nt, Artificial Sequence
  targeting sequence with TTCN PAM
aaauuggaugccuuaaacag

SEQ ID NO: 21686 - RNA, 20 nt, Artificial Sequence
  targeting sequence with TTCN PAM
cuuuaacuagauuuauaaau

SEQ ID NO: 21687 - RNA, 20 nt, Artificial Sequence
  targeting sequence with TTCN PAM
uauuuauaaaucuaguuaaa

SEQ ID NO: 21688 - RNA, 20 nt, Artificial Sequence
  targeting sequence with TTCN PAM
auuuacaaauauuuuccuau

SEQ ID NO: 21689 - RNA, 20 nt, Artificial Sequence
  targeting sequence with TTCN PAM
uaaguucaauuuacaaauau

SEQ ID NO: 21690 - RNA, 20 nt, Artificial Sequence
  targeting sequence with TTCN PAM
ccuuaaguucuuaaguucaa

SEQ ID NO: 21691 - RNA, 20 nt, Artificial Sequence
  targeting sequence with TTCN PAM
cuaaaguuauuucuuuuaua

SEQ ID NO: 21692 - RNA, 20 nt, Artificial Sequence
  targeting sequence with TTCN PAM
uuuauaaauugaauauuagu

SEQ ID NO: 21693 - RNA, 20 nt, Artificial Sequence
  targeting sequence with TTCN PAM
auuuauaaaagaaauaacuu

SEQ ID NO: 21694 - RNA, 20 nt, Artificial Sequence
  targeting sequence with TTCN PAM
caaaagacacccuuggggca

SEQ ID NO: 21695 - RNA, 20 nt, Artificial Sequence
  targeting sequence with TTCN PAM
ucugccucagccccucacca

SEQ ID NO: 21696 - RNA, 20 nt, Artificial Sequence
  targeting sequence with TTCN PAM
gggcucaauuccucugccuc

SEQ ID NO: 21697 - RNA, 20 nt, Artificial Sequence
  targeting sequence with TTCN PAM
agguugcauugaguuaugau

SEQ ID NO: 21698 - RNA, 20 nt, Artificial Sequence
  targeting sequence with TTCN PAM
agccuaagccacagagugug

SEQ ID NO: 21699 - RNA, 20 nt, Artificial Sequence
  targeting sequence with TTCN PAM
cuguggccaauaagcacaug

SEQ ID NO: 21700 - RNA, 20 nt, Artificial Sequence
  targeting sequence with TTCN PAM
ugugcuuauuggccacagag

SEQ ID NO: 21701 - RNA, 20 nt, Artificial Sequence
  targeting sequence with TTCN PAM
ugauggcuaaugauauggag

SEQ ID NO: 21702 - RNA, 20 nt, Artificial Sequence
  targeting sequence with TTCN PAM
auuugcauuuuccugauggc

SEQ ID NO: 21703 - RNA, 20 nt, Artificial Sequence
  targeting sequence with TTCN PAM
cacucacuaaaauggagaaa

SEQ ID NO: 21704 - RNA, 20 nt, Artificial Sequence
  targeting sequence with TTCN PAM
ccauuuuagugagugcgaau

SEQ ID NO: 21705 - RNA, 20 nt, Artificial Sequence
  targeting sequence with TTCN PAM
aauuucuccauuuuagugag

SEQ ID NO: 21706 - RNA, 20 nt, Artificial Sequence
  targeting sequence with TTCN PAM
cuugaaaaguguagcaguuc

SEQ ID NO: 21707 - RNA, 20 nt, Artificial Sequence
  targeting sequence with TTCN PAM
agugaaugcaccacuuuaua

SEQ ID NO: 21708 - RNA, 20 nt, Artificial Sequence
  targeting sequence with TTCN PAM
uaaaaaagguucaacguaga

SEQ ID NO: 21709 - RNA, 20 nt, Artificial Sequence
  targeting sequence with TTCN PAM
acguagaguuuaaaaauaaa

SEQ ID NO: 21710 - RNA, 20 nt, Artificial Sequence
  targeting sequence with TTCN PAM
ccuuguugucccggcuaguc

SEQ ID NO: 21711 - RNA, 20 nt, Artificial Sequence
  targeting sequence with TTCN PAM
cacacaucuguagucccagc

SEQ ID NO: 21712 - RNA, 20 nt, Artificial Sequence
  targeting sequence with TTCN PAM
cgugauccuccuaccucagc

SEQ ID NO: 21713 - RNA, 20 nt, Artificial Sequence
  targeting sequence with TTCN PAM
cagcuucacgugauccuccu

SEQ ID NO: 21714 - RNA, 20 nt, Artificial Sequence
  targeting sequence with TTCN PAM
acuccuggacucaagcgauc

SEQ ID NO: 21715 - RNA, 20 nt, Artificial Sequence
  targeting sequence with TTCN PAM
agauggggucucacucuguc

SEQ ID NO: 21716 - RNA, 20 nt, Artificial Sequence
  targeting sequence with TTCN PAM
uuuuuuaauucuuguuuauu

SEQ ID NO: 21717 - RNA, 20 nt, Artificial Sequence
  targeting sequence with TTCN PAM
cuucauuuuuuaauucuugu

SEQ ID NO: 21718 - RNA, 20 nt, Artificial Sequence
  targeting sequence with TTCN PAM
gcaacuacacccauacuacu

SEQ ID NO: 21719 - RNA, 20 nt, Artificial Sequence
  targeting sequence with TTCN PAM
guuuaaagacuguccuuuau

SEQ ID NO: 21720 - RNA, 20 nt, Artificial Sequence
  targeting sequence with TTCN PAM
cgccaacuuuagagggaguu

SEQ ID NO: 21721 - RNA, 20 nt, Artificial Sequence
  targeting sequence with TTCN PAM
gaaaugguuuuucccuugcu

SEQ ID NO: 21722 - RNA, 20 nt, Artificial Sequence
  targeting sequence with TTCN PAM
gaauccauaaccauugcaau

SEQ ID NO: 21723 - RNA, 20 nt, Artificial Sequence
  targeting sequence with TTCN PAM
cuugcuguguguucuuuuuc

SEQ ID NO: 21724 - RNA, 20 nt, Artificial Sequence
  targeting sequence with TTCN PAM
uuuuccucagauuggaaagg

SEQ ID NO: 21725 - RNA, 20 nt, Artificial Sequence
  targeting sequence with TTCN PAM
ucagauuggaaaggaucggg

SEQ ID NO: 21726 - RNA, 20 nt, Artificial Sequence
  targeting sequence with TTCN PAM
aaucugaggaaaaagaacac

SEQ ID NO: 21727 - RNA, 20 nt, Artificial Sequence
  targeting sequence with TTCN PAM
gugcccgauccuuuccaauc

SEQ ID NO: 21728 - RNA, 20 nt, Artificial Sequence
  targeting sequence with TTCN PAM
gacaagcaaguaucucuuuu

SEQ ID NO: 21729 - RNA, 20 nt, Artificial Sequence
  targeting sequence with TTCN PAM
ccaaggauggagugcggcuu

SEQ ID NO: 21730 - RNA, 20 nt, Artificial Sequence
  targeting sequence with TTCN PAM
gcuccccaacagucccaagc

SEQ ID NO: 21731 - RNA, 20 nt, Artificial Sequence
  targeting sequence with TTCN PAM
cuugacacguccacacccag

SEQ ID NO: 21732 - RNA, 20 nt, Artificial Sequence
  targeting sequence with TTCN PAM
aacuaugugguaagaagaga

SEQ ID NO: 21733 - RNA, 20 nt, Artificial Sequence
  targeting sequence with TTCN PAM
uaccacauaguuggaauccg

SEQ ID NO: 21734 - RNA, 20 nt, Artificial Sequence
  targeting sequence with TTCN PAM
cuucuuaccacauaguugga

SEQ ID NO: 21735 - RNA, 20 nt, Artificial Sequence
  targeting sequence with TTCN PAM
guggggccauggcuugaaga

SEQ ID NO: 21736 - RNA, 20 nt, Artificial Sequence
  targeting sequence with TTCN PAM
agccauggccccacagaaca

SEQ ID NO: 21737 - RNA, 20 nt, Artificial Sequence
  targeting sequence with TTCN PAM
cagcucucuggagaaagucu

SEQ ID NO: 21738 - RNA, 20 nt, Artificial Sequence
  targeting sequence with TTCN PAM
cucaccccgcagguggucgg

SEQ ID NO: 21739 - RNA, 20 nt, Artificial Sequence
  targeting sequence with TTCN PAM
uucuaccagcuuauuuucag

SEQ ID NO: 21740 - RNA, 20 nt, Artificial Sequence
  targeting sequence with TTCN PAM
accagcuuauuuucagcaca

SEQ ID NO: 21741 - RNA, 20 nt, Artificial Sequence
  targeting sequence with TTCN PAM
gcacaguccaugggcuuuac

SEQ ID NO: 21742 - RNA, 20 nt, Artificial Sequence
  targeting sequence with TTCN PAM
gcucagugaucaggugcugc

SEQ ID NO: 21743 - RNA, 20 nt, Artificial Sequence
  targeting sequence with TTCN PAM
caaggucuggaccugccucu

SEQ ID NO: 21744 - RNA, 20 nt, Artificial Sequence
  targeting sequence with TTCN PAM
gguguauucauaucuggaug

SEQ ID NO: 21745 - RNA, 20 nt, Artificial Sequence
  targeting sequence with TTCN PAM
gaucaccgggggccacuagu

SEQ ID NO: 21746 - RNA, 20 nt, Artificial Sequence
  targeting sequence with TTCN PAM
gcagaguugauuguauguau

SEQ ID NO: 21747 - RNA, 20 nt, Artificial Sequence
  targeting sequence with TTCN PAM
augagaguaucucacuuuaa

SEQ ID NO: 21748 - RNA, 20 nt, Artificial Sequence
  targeting sequence with TTCN PAM
cugccuugcaccuuacauaa

SEQ ID NO: 21749 - RNA, 20 nt, Artificial Sequence
  targeting sequence with TTCN PAM
agcaagagguuguuauguaa

SEQ ID NO: 21750 - RNA, 20 nt, Artificial Sequence
  targeting sequence with TTCN PAM
uugacaguucggauuaaaug

SEQ ID NO: 21751 - RNA, 20 nt, Artificial Sequence
  targeting sequence with TTCN PAM
gauuaaaugcaaagagcuug

SEQ ID NO: 21752 - RNA, 20 nt, Artificial Sequence
  targeting sequence with TTCN PAM
ugacaagcucuuugcauuua

SEQ ID NO: 21753 - RNA, 20 nt, Artificial Sequence
  targeting sequence with TTCN PAM
guagauggcaaucuucuuga

SEQ ID NO: 21754 - RNA, 20 nt, Artificial Sequence
  targeting sequence with TTCN PAM
cuggcaguuggauagccaau

SEQ ID NO: 21755 - RNA, 20 nt, Artificial Sequence
  targeting sequence with TTCN PAM
gaggacuuaucagacaugca

SEQ ID NO: 21756 - RNA, 20 nt, Artificial Sequence
  targeting sequence with TTCN PAM
ccuuuacccgguaaugcaug

SEQ ID NO: 21757 - RNA, 20 nt, Artificial Sequence
  targeting sequence with TTCN PAM
ugauaaucuucuccuuuacc

SEQ ID NO: 21758 - RNA, 20 nt, Artificial Sequence
  targeting sequence with TTCN PAM
acaugcugcugcccaccugg

SEQ ID NO: 21759 - RNA, 20 nt, Artificial Sequence
  targeting sequence with TTCN PAM
gcccaacuccuucaacaugc

SEQ ID NO: 21760 - RNA, 20 nt, Artificial Sequence
  targeting sequence with TTCN PAM
auuugugcuccccccccagu

SEQ ID NO: 21761 - RNA, 20 nt, Artificial Sequence
  targeting sequence with TTCN PAM
ccaguuuauggcucaugacu

SEQ ID NO: 21762 - RNA, 20 nt, Artificial Sequence
  targeting sequence with TTCN PAM
uaaaguacugggauuauagg

SEQ ID NO: 21763 - RNA, 20 nt, Artificial Sequence
  targeting sequence with TTCN PAM
uggcuagacacaguggcuca

SEQ ID NO: 21764 - RNA, 20 nt, Artificial Sequence
  targeting sequence with TTCN PAM
guacaccaauuuauguuuua

SEQ ID NO: 21765 - RNA, 20 nt, Artificial Sequence
  targeting sequence with TTCN PAM
uucuguacaccaauuuaugu

SEQ ID NO: 21766 - RNA, 20 nt, Artificial Sequence
  targeting sequence with TTCN PAM
uugacaauuacugaguugau

SEQ ID NO: 21767 - RNA, 20 nt, Artificial Sequence
  targeting sequence with TTCN PAM
ugaaagauuuuuuuucauag

SEQ ID NO: 21768 - RNA, 20 nt, Artificial Sequence
  targeting sequence with TTCN PAM
ggaauuaaaacuuccuugac

SEQ ID NO: 21769 - RNA, 20 nt, Artificial Sequence
  targeting sequence with TTCN PAM
uagaaaaauauuucucaaga

SEQ ID NO: 21770 - RNA, 20 nt, Artificial Sequence
  targeting sequence with TTCN PAM
augaaaaaaaaucuuucagg

SEQ ID NO: 21771 - RNA, 20 nt, Artificial Sequence
  targeting sequence with TTCN PAM
caagauucuuagagaguguc

SEQ ID NO: 21772 - RNA, 20 nt, Artificial Sequence
  targeting sequence with TTCN PAM
uagagagugucuaagucaau

SEQ ID NO: 21773 - RNA, 20 nt, Artificial Sequence
  targeting sequence with TTCN PAM
cuuggcauugacuuagacac

SEQ ID NO: 21774 - RNA, 20 nt, Artificial Sequence
  targeting sequence with TTCN PAM
aaacuucucuuggcauugac

SEQ ID NO: 21775 - RNA, 20 nt, Artificial Sequence
  targeting sequence with TTCN PAM
cucaaagucuuuccaaacuu

SEQ ID NO: 21776 - RNA, 20 nt, Artificial Sequence
  targeting sequence with TTCN PAM
aagaugcugggcuagccuuc

SEQ ID NO: 21777 - RNA, 20 nt, Artificial Sequence
  targeting sequence with TTCN PAM
guuggaggugauaaaagaga

SEQ ID NO: 21778 - RNA, 20 nt, Artificial Sequence
  targeting sequence with TTCN PAM
aacuuugauuauuuauuuau

SEQ ID NO: 21779 - RNA, 20 nt, Artificial Sequence
  targeting sequence with TTCN PAM
augcaaacccccacccaggc

SEQ ID NO: 21780 - RNA, 20 nt, Artificial Sequence
  targeting sequence with TTCN PAM
gccucagaucuucaaugcaa

SEQ ID NO: 21781 - RNA, 20 nt, Artificial Sequence
  targeting sequence with TTCN PAM
ccacggagcccaauucagcc

SEQ ID NO: 21782 - RNA, 20 nt, Artificial Sequence
  targeting sequence with TTCN PAM
guauccaucuaucuaaccca

SEQ ID NO: 21783 - RNA, 20 nt, Artificial Sequence
  targeting sequence with TTCN PAM
ccccuuagggacagaaagau

SEQ ID NO: 21784 - RNA, 20 nt, Artificial Sequence
  targeting sequence with TTCN PAM
gucccuaaggggagaaaaua

SEQ ID NO: 21785 - RNA, 20 nt, Artificial Sequence
  targeting sequence with TTCN PAM
guugaauuuccaugcagagc

SEQ ID NO: 21786 - RNA, 20 nt, Artificial Sequence
  targeting sequence with TTCN PAM
acagaauaagugcccccaga

SEQ ID NO: 21787 - RNA, 20 nt, Artificial Sequence
  targeting sequence with TTCN PAM
augcagagcuggguuugcuu

SEQ ID NO: 21788 - RNA, 20 nt, Artificial Sequence
  targeting sequence with TTCN PAM
uaggagaaacggcugcagug

SEQ ID NO: 21789 - RNA, 20 nt, Artificial Sequence
  targeting sequence with TTCN PAM
ccuaggaagcaaacccagcu

SEQ ID NO: 21790 - RNA, 20 nt, Artificial Sequence
  targeting sequence with TTCN PAM
gcggagugaaggagcgggag

SEQ ID NO: 21791 - RNA, 20 nt, Artificial Sequence
  targeting sequence with TTCN PAM
cuccgcugaaggacaggcac

SEQ ID NO: 21792 - RNA, 20 nt, Artificial Sequence
  targeting sequence with TTCN PAM
uuacaucaaggugaucggug

SEQ ID NO: 21793 - RNA, 20 nt, Artificial Sequence
  targeting sequence with TTCN PAM
aggagggccaccgaucaccu

SEQ ID NO: 21794 - RNA, 20 nt, Artificial Sequence
  targeting sequence with TTCN PAM
cuuccaggagggccaccgau

SEQ ID NO: 21795 - RNA, 20 nt, Artificial Sequence
  targeting sequence with TTCN PAM
gccccacuaagaggccuucu

SEQ ID NO: 21796 - RNA, 20 nt, Artificial Sequence
  targeting sequence with TTCN PAM
ucagccccacuaagaggccu

SEQ ID NO: 21797 - RNA, 20 nt, Artificial Sequence
  targeting sequence with TTCN PAM
cagggcaggaaaagggcuuc

SEQ ID NO: 21798 - RNA, 20 nt, Artificial Sequence
  targeting sequence with TTCN PAM
ugcccugagaacccagcuca

SEQ ID NO: 21799 - RNA, 20 nt, Artificial Sequence
  targeting sequence with TTCN PAM
cuccuccaugggugaauugu

SEQ ID NO: 21800 - RNA, 20 nt, Artificial Sequence
  targeting sequence with TTCN PAM
cccauggaggagagaagccc

SEQ ID NO: 21801 - RNA, 20 nt, Artificial Sequence
  targeting sequence with TTCN PAM
guuuuuugaggacagccuca

SEQ ID NO: 21802 - RNA, 20 nt, Artificial Sequence
  targeting sequence with TTCN PAM
ggagaccuuaagccacuaau

SEQ ID NO: 21803 - RNA, 20 nt, Artificial Sequence
  targeting sequence with TTCN PAM
guggauuucuagagggaggc

SEQ ID NO: 21804 - RNA, 20 nt, Artificial Sequence
  targeting sequence with TTCN PAM
agagggaggcagagaucguu

SEQ ID NO: 21805 - RNA, 20 nt, Artificial Sequence
  targeting sequence with TTCN PAM
agcauguguccuaaagaaug

SEQ ID NO: 21806 - RNA, 20 nt, Artificial Sequence
  targeting sequence with TTCN PAM
uuaggacacaugcuggaacg

SEQ ID NO: 21807 - RNA, 20 nt, Artificial Sequence
  targeting sequence with TTCN PAM
guguguguguauacaugugu

SEQ ID NO: 21808 - RNA, 20 nt, Artificial Sequence
  targeting sequence with TTCN PAM
uugcucagcauaagaaaagu

SEQ ID NO: 21809 - RNA, 20 nt, Artificial Sequence
  targeting sequence with TTCN PAM
uaugcugagcaaagaacaca

SEQ ID NO: 21810 - RNA, 20 nt, Artificial Sequence
  targeting sequence with TTCN PAM
aaguaggcugcuacauggaa

SEQ ID NO: 21811 - RNA, 20 nt, Artificial Sequence
  targeting sequence with TTCN PAM
auguagcagccuacuuagaa

SEQ ID NO: 21812 - RNA, 20 nt, Artificial Sequence
  targeting sequence with TTCN PAM
aaguuccauguagcagccua

SEQ ID NO: 21813 - RNA, 20 nt, Artificial Sequence
  targeting sequence with TTCN PAM
auccccagcaaagaccugac

SEQ ID NO: 21814 - RNA, 20 nt, Artificial Sequence
  targeting sequence with TTCN PAM
cccacugcucucaugcccug

SEQ ID NO: 21815 - RNA, 20 nt, Artificial Sequence
  targeting sequence with TTCN PAM
uagggcugucaaaaacagau

SEQ ID NO: 21816 - RNA, 20 nt, Artificial Sequence
  targeting sequence with TTCN PAM
accacaugucuugucagugu

SEQ ID NO: 21817 - RNA, 20 nt, Artificial Sequence
  targeting sequence with TTCN PAM
uaguagcuuuuuccuguguu

SEQ ID NO: 21818 - RNA, 20 nt, Artificial Sequence
  targeting sequence with TTCN PAM
uguguuaguucgugacucag

SEQ ID NO: 21819 - RNA, 20 nt, Artificial Sequence
  targeting sequence with TTCN PAM
ugacucagaucucugcuagg

SEQ ID NO: 21820 - RNA, 20 nt, Artificial Sequence
  targeting sequence with TTCN PAM
gacuggggauuuguugauga

SEQ ID NO: 21821 - RNA, 20 nt, Artificial Sequence
  targeting sequence with TTCN PAM
gugucuguucggacugggga

SEQ ID NO: 21822 - RNA, 20 nt, Artificial Sequence
  targeting sequence with TTCN PAM
gcagccucugaugaaccucg

SEQ ID NO: 21823 - RNA, 20 nt, Artificial Sequence
  targeting sequence with TTCN PAM
ucagaggcugcagaaguaau

SEQ ID NO: 21824 - RNA, 20 nt, Artificial Sequence
  targeting sequence with TTCN PAM
ggccuccuaaggauaagcca

SEQ ID NO: 21825 - RNA, 20 nt, Artificial Sequence
  targeting sequence with TTCN PAM
uuugaugaguccuuuucccu

SEQ ID NO: 21826 - RNA, 20 nt, Artificial Sequence
  targeting sequence with TTCN PAM
cugcacagagcuucugguga

SEQ ID NO: 21827 - RNA, 20 nt, Artificial Sequence
  targeting sequence with TTCN PAM
ggugaagguggugggaguug

SEQ ID NO: 21828 - RNA, 20 nt, Artificial Sequence
  targeting sequence with TTCN PAM
ccagaagcucugugcaggga

SEQ ID NO: 21829 - RNA, 20 nt, Artificial Sequence
  targeting sequence with TTCN PAM
ugcagagcacaugggauucc

SEQ ID NO: 21830 - RNA, 20 nt, Artificial Sequence
  targeting sequence with TTCN PAM
aacggccuggcagugggcca

SEQ ID NO: 21831 - RNA, 20 nt, Artificial Sequence
  targeting sequence with TTCN PAM
cugaaauuuugccagauccu

SEQ ID NO: 21832 - RNA, 20 nt, Artificial Sequence
  targeting sequence with TTCN PAM
gcgaaaacagugucagucac

SEQ ID NO: 21833 - RNA, 20 nt, Artificial Sequence
  targeting sequence with TTCN PAM
ggaucuggcaaaauuucagc

SEQ ID NO: 21834 - RNA, 20 nt, Artificial Sequence
  targeting sequence with TTCN PAM
uggacaaucucuuugcuauc

SEQ ID NO: 21835 - RNA, 20 nt, Artificial Sequence
  targeting sequence with TTCN PAM
gcaggacgauagcaaagaga

SEQ ID NO: 21836 - RNA, 20 nt, Artificial Sequence
  targeting sequence with TTCN PAM
uacgggaggcacucaugucc

SEQ ID NO: 21837 - RNA, 20 nt, Artificial Sequence
  targeting sequence with TTCN PAM
ucuaccacggccagcuucuu

SEQ ID NO: 21838 - RNA, 20 nt, Artificial Sequence
  targeting sequence with TTCN PAM
ggugaagucccugagggggc

SEQ ID NO: 21839 - RNA, 20 nt, Artificial Sequence
  targeting sequence with TTCN PAM
ccugaaaaagcagcuccuug

SEQ ID NO: 21840 - RNA, 20 nt, Artificial Sequence
  targeting sequence with TTCN PAM
cagucccugcaggaggcucu

SEQ ID NO: 21841 - RNA, 20 nt, Artificial Sequence
  targeting sequence with TTCN PAM
uugccaauggaaaccgaagg

SEQ ID NO: 21842 - RNA, 20 nt, Artificial Sequence
  targeting sequence with TTCN PAM
auuggcaaggaaaccaaagu

SEQ ID NO: 21843 - RNA, 20 nt, Artificial Sequence
  targeting sequence with TTCN PAM
guuuccauuggcaaggaaac

SEQ ID NO: 21844 - RNA, 20 nt, Artificial Sequence
  targeting sequence with TTCN PAM
uaagcguuuaccaugaacaa

SEQ ID NO: 21845 - RNA, 20 nt, Artificial Sequence
  targeting sequence with TTCN PAM
ugguaaacgcuuaagaaagg

SEQ ID NO: 21846 - RNA, 20 nt, Artificial Sequence
  targeting sequence with TTCN PAM
uguucaugguaaacgcuuaa

SEQ ID NO: 21847 - RNA, 20 nt, Artificial Sequence
  targeting sequence with TTCN PAM
cugagugccaacgucacacc

SEQ ID NO: 21848 - RNA, 20 nt, Artificial Sequence
  targeting sequence with TTCN PAM
uuugcagaagucugugucuc

SEQ ID NO: 21849 - RNA, 20 nt, Artificial Sequence
  targeting sequence with TTCN PAM
gcaaaggaagugcauccauc

SEQ ID NO: 21850 - RNA, 20 nt, Artificial Sequence
  targeting sequence with TTCN PAM
cacgcuguaggugcgcauag

SEQ ID NO: 21851 - RNA, 20 nt, Artificial Sequence
  targeting sequence with TTCN PAM
uucccacgcuguaggugcgc

SEQ ID NO: 21852 - RNA, 20 nt, Artificial Sequence
  targeting sequence with TTCN PAM
gaugacaaaacauccuguuu

SEQ ID NO: 21853 - RNA, 20 nt, Artificial Sequence
  targeting sequence with TTCN PAM
cccuuucagaugacaaaaca

SEQ ID NO: 21854 - RNA, 20 nt, Artificial Sequence
  targeting sequence with TTCN PAM
acuuaauucacaagaaugcu

SEQ ID NO: 21855 - RNA, 20 nt, Artificial Sequence
  targeting sequence with TTCN PAM
caagaaugcuagaagagcca

SEQ ID NO: 21856 - RNA, 20 nt, Artificial Sequence
  targeting sequence with TTCN PAM
ugugaauuaaguagaaggcc

SEQ ID NO: 21857 - RNA, 20 nt, Artificial Sequence
  targeting sequence with TTCN PAM
agcauucuugugaauuaagu

SEQ ID NO: 21858 - RNA, 20 nt, Artificial Sequence
  targeting sequence with TTCN PAM
gcuggcucuucuagcauucu

SEQ ID NO: 21859 - RNA, 20 nt, Artificial Sequence
  targeting sequence with TTCN PAM
cauucugcuggcucuucuag

SEQ ID NO: 21860 - RNA, 20 nt, Artificial Sequence
  targeting sequence with TTCN PAM
guggagucauccagcccugu

SEQ ID NO: 21861 - RNA, 20 nt, Artificial Sequence
  targeting sequence with TTCN PAM
ucaggccacagggcuggaug

SEQ ID NO: 21862 - RNA, 20 nt, Artificial Sequence
  targeting sequence with TTCN PAM
cuggugacacacuuccucag

SEQ ID NO: 21863 - RNA, 20 nt, Artificial Sequence
  targeting sequence with TTCN PAM
gcugggcucgcgccauucuu

SEQ ID NO: 21864 - RNA, 20 nt, Artificial Sequence
  targeting sequence with TTCN PAM
uucucucuuuaggucuuugu

SEQ ID NO: 21865 - RNA, 20 nt, Artificial Sequence
  targeting sequence with TTCN PAM
cucuuuaggucuuuguaggu

SEQ ID NO: 21866 - RNA, 20 nt, Artificial Sequence
  targeting sequence with TTCN PAM
agagugaaguuccccccaaa

SEQ ID NO: 21867 - RNA, 20 nt, Artificial Sequence
  targeting sequence with TTCN PAM
cucuggaaaaccaguccuga

SEQ ID NO: 21868 - RNA, 20 nt, Artificial Sequence
  targeting sequence with TTCN PAM
ccccaaagcuggagccccuc

SEQ ID NO: 21869 - RNA, 20 nt, Artificial Sequence
  targeting sequence with TTCN PAM
ucggccacugcaggguuucc

SEQ ID NO: 21870 - RNA, 20 nt, Artificial Sequence
  targeting sequence with TTCN PAM
ugauguuaugggcagauuca

SEQ ID NO: 21871 - RNA, 20 nt, Artificial Sequence
  targeting sequence with TTCN PAM
guccccuuaccaggcuccuc

SEQ ID NO: 21872 - RNA, 20 nt, Artificial Sequence
  targeting sequence with TTCN PAM
cagcagcagaaucgaugggg

SEQ ID NO: 21873 - RNA, 20 nt, Artificial Sequence
  targeting sequence with TTCN PAM
gcugcugagaacaaggagga

SEQ ID NO: 21874 - RNA, 20 nt, Artificial Sequence
  targeting sequence with TTCN PAM
aauugacugaggcugcuccc

SEQ ID NO: 21875 - RNA, 20 nt, Artificial Sequence
  targeting sequence with TTCN PAM
acucucucaaggacaugagu

SEQ ID NO: 21876 - RNA, 20 nt, Artificial Sequence
  targeting sequence with TTCN PAM
gggaaagagagggcauagcc

SEQ ID NO: 21877 - RNA, 20 nt, Artificial Sequence
  targeting sequence with TTCN PAM
ccgaaaccauucuacucucu

SEQ ID NO: 21878 - RNA, 20 nt, Artificial Sequence
  targeting sequence with TTCN PAM
agcugaccugggcuuggguc

SEQ ID NO: 21879 - RNA, 20 nt, Artificial Sequence
  targeting sequence with TTCN PAM
cuaaaaugaaauuaguaauu

SEQ ID NO: 21880 - RNA, 20 nt, Artificial Sequence
  targeting sequence with TTCN PAM
uuuuagagaaaaguaauuaa

SEQ ID NO: 21881 - RNA, 20 nt, Artificial Sequence
  targeting sequence with TTCN PAM
guaaggggcaauuacuaauu

SEQ ID NO: 21882 - RNA, 20 nt, Artificial Sequence
  targeting sequence with TTCN PAM
uguagcaauucuguaagggg

SEQ ID NO: 21883 - RNA, 20 nt, Artificial Sequence
  targeting sequence with TTCN PAM
ggccccauuuugugcucaac

SEQ ID NO: 21884 - RNA, 20 nt, Artificial Sequence
  targeting sequence with TTCN PAM
cuucuccccagccucaccuc

SEQ ID NO: 21885 - RNA, 20 nt, Artificial Sequence
  targeting sequence with TTCN PAM
ccccagccucaccucccacc

SEQ ID NO: 21886 - RNA, 20 nt, Artificial Sequence
  targeting sequence with TTCN PAM
cagcccugccaggagacauc

SEQ ID NO: 21887 - RNA, 20 nt, Artificial Sequence
  targeting sequence with TTCN PAM
cagcuguaacauugccugcu

SEQ ID NO: 21888 - RNA, 20 nt, Artificial Sequence
  targeting sequence with TTCN PAM
gccuaggaucuuuuauaaug

SEQ ID NO: 21889 - RNA, 20 nt, Artificial Sequence
  targeting sequence with TTCN PAM
ggagaauaauuuuuuuucaa

SEQ ID NO: 21890 - RNA, 20 nt, Artificial Sequence
  targeting sequence with TTCN PAM
ccugaaauaugcucauaccu

SEQ ID NO: 21891 - RNA, 20 nt, Artificial Sequence
  targeting sequence with TTCN PAM
aaaguaauacuugcuuacuc

SEQ ID NO: 21892 - RNA, 20 nt, Artificial Sequence
  targeting sequence with TTCN PAM
aacaacacgcaggugcaugg

SEQ ID NO: 21893 - RNA, 20 nt, Artificial Sequence
  targeting sequence with TTCN PAM
cacaggauccccacuguccc

SEQ ID NO: 21894 - RNA, 20 nt, Artificial Sequence
  targeting sequence with TTCN PAM
ccaggaaccaaacgccaaca

SEQ ID NO: 21895 - RNA, 20 nt, Artificial Sequence
  targeting sequence with TTCN PAM
uggggaacagggacaguggg

SEQ ID NO: 21896 - RNA, 20 nt, Artificial Sequence
  targeting sequence with TTCN PAM
aagcuacacuguuggcguuu

SEQ ID NO: 21897 - RNA, 20 nt, Artificial Sequence
  targeting sequence with TTCN PAM
cgggaggaggcuaccucaac

SEQ ID NO: 21898 - RNA, 20 nt, Artificial Sequence
  targeting sequence with TTCN PAM
cugugcaccggcagaagcug

SEQ ID NO: 21899 - RNA, 20 nt, Artificial Sequence
  targeting sequence with TTCN PAM
gccggugcacagggaaggug

SEQ ID NO: 21900 - RNA, 20 nt, Artificial Sequence
  targeting sequence with TTCN PAM
gccuccaugucuucuccauu

SEQ ID NO: 21901 - RNA, 20 nt, Artificial Sequence
  targeting sequence with TTCN PAM
ccauuucugccguggaggug

SEQ ID NO: 21902 - RNA, 20 nt, Artificial Sequence
  targeting sequence with TTCN PAM
gccguggaggugccgcaggu

SEQ ID NO: 21903 - RNA, 20 nt, Artificial Sequence
  targeting sequence with TTCN PAM
caucccuuccuuuauggcua

SEQ ID NO: 21904 - RNA, 20 nt, Artificial Sequence
  targeting sequence with TTCN PAM
uuuauggcuaucuucucauu

SEQ ID NO: 21905 - RNA, 20 nt, Artificial Sequence
  targeting sequence with TTCN PAM
cauuucaccucacauucggu

SEQ ID NO: 21906 - RNA, 20 nt, Artificial Sequence
  targeting sequence with TTCN PAM
ccucacauucgguuauggca

SEQ ID NO: 21907 - RNA, 20 nt, Artificial Sequence
  targeting sequence with TTCN PAM
guuauggcagccccaucacu

SEQ ID NO: 21908 - RNA, 20 nt, Artificial Sequence
  targeting sequence with TTCN PAM
uagacagugauggggcugcc

SEQ ID NO: 21909 - RNA, 20 nt, Artificial Sequence
  targeting sequence with TTCN PAM
cucaacaaucuccuaaagca

SEQ ID NO: 21910 - RNA, 20 nt, Artificial Sequence
  targeting sequence with TTCN PAM
gugucaguaaaugguaaaug

SEQ ID NO: 21911 - RNA, 20 nt, Artificial Sequence
  targeting sequence with TTCN PAM
uauucugcauggcaaaauuu

SEQ ID NO: 21912 - RNA, 20 nt, Artificial Sequence
  targeting sequence with TTCN PAM
gcauggcaaaauuuagggua

SEQ ID NO: 21913 - RNA, 20 nt, Artificial Sequence
  targeting sequence with TTCN PAM
uacaauuuaugugagucuac

SEQ ID NO: 21914 - RNA, 20 nt, Artificial Sequence
  targeting sequence with TTCN PAM
cccaacgguaacagugugca

SEQ ID NO: 21915 - RNA, 20 nt, Artificial Sequence
  targeting sequence with TTCN PAM
cacccauguuggcaugugua

SEQ ID NO: 21916 - RNA, 20 nt, Artificial Sequence
  targeting sequence with TTCN PAM
gugccaugacugugguggga

SEQ ID NO: 21917 - RNA, 20 nt, Artificial Sequence
  targeting sequence with TTCN PAM
acagcuuucuuuaccagucc

SEQ ID NO: 21918 - RNA, 20 nt, Artificial Sequence
  targeting sequence with TTCN PAM
uuaccaguccuacuggacau

SEQ ID NO: 21919 - RNA, 20 nt, Artificial Sequence
  targeting sequence with TTCN PAM
agcuagguccuugcaccugu

SEQ ID NO: 21920 - RNA, 20 nt, Artificial Sequence
  targeting sequence with TTCN PAM
uagaaaugaaauugcugggu

SEQ ID NO: 21921 - RNA, 20 nt, Artificial Sequence
  targeting sequence with TTCN PAM
aggaauuuaugccaaggcgc

SEQ ID NO: 21922 - RNA, 20 nt, Artificial Sequence
  targeting sequence with TTCN PAM
uuucuaggaauuuaugccaa

SEQ ID NO: 21923 - RNA, 20 nt, Artificial Sequence
  targeting sequence with TTCN PAM
aagguacacgugcuuugacc

SEQ ID NO: 21924 - RNA, 20 nt, Artificial Sequence
  targeting sequence with TTCN PAM
cuaaaagucuuucaaaggua

SEQ ID NO: 21925 - RNA, 20 nt, Artificial Sequence
  targeting sequence with TTCN PAM
agguuucccuuccgcuaggc

SEQ ID NO: 21926 - RNA, 20 nt, Artificial Sequence
  targeting sequence with TTCN PAM
cuuccgcuaggcucugucag

SEQ ID NO: 21927 - RNA, 20 nt, Artificial Sequence
  targeting sequence with TTCN PAM
gcuaggcucugucagucugu

SEQ ID NO: 21928 - RNA, 20 nt, Artificial Sequence
  targeting sequence with TTCN PAM
ccauacaacucagcuucagg

SEQ ID NO: 21929 - RNA, 20 nt, Artificial Sequence
  targeting sequence with TTCN PAM
ggcuagagcccacuucuucu

SEQ ID NO: 21930 - RNA, 20 nt, Artificial Sequence
  targeting sequence with TTCN PAM
ucuaaguugaugauacccuc

SEQ ID NO: 21931 - RNA, 20 nt, Artificial Sequence
  targeting sequence with TTCN PAM
aaguugaugauacccucgaa

SEQ ID NO: 21932 - RNA, 20 nt, Artificial Sequence
  targeting sequence with TTCN PAM
aggguaucaucaacuuagaa

SEQ ID NO: 21933 - RNA, 20 nt, Artificial Sequence
  targeting sequence with TTCN PAM
ccaguaagucuugcagucau

SEQ ID NO: 21934 - RNA, 20 nt, Artificial Sequence
  targeting sequence with TTCN PAM
agaaauguuaguggaauuca

SEQ ID NO: 21935 - RNA, 20 nt, Artificial Sequence
  targeting sequence with TTCN PAM
ugaauagcugaucuguguca

SEQ ID NO: 21936 - RNA, 20 nt, Artificial Sequence
  targeting sequence with TTCN PAM
acuaacauuucuugaauagc

SEQ ID NO: 21937 - RNA, 20 nt, Artificial Sequence
  targeting sequence with TTCN PAM
gaucugaggaaaaagaccag

SEQ ID NO: 21938 - RNA, 20 nt, Artificial Sequence
  targeting sequence with TTCN PAM
ucagaucugaauuccacuaa

SEQ ID NO: 21939 - RNA, 20 nt, Artificial Sequence
  targeting sequence with TTCN PAM
ggucuuuuuccucagaucug

SEQ ID NO: 21940 - RNA, 20 nt, Artificial Sequence
  targeting sequence with TTCN PAM
ucuugcuuucuggucuuuuu

SEQ ID NO: 21941 - RNA, 20 nt, Artificial Sequence
  targeting sequence with TTCN PAM
uccucuugcuuucuggucuu

SEQ ID NO: 21942 - RNA, 20 nt, Artificial Sequence
  targeting sequence with TTCN PAM
cuucuuccucuugcuuucug

SEQ ID NO: 21943 - RNA, 20 nt, Artificial Sequence
  targeting sequence with TTCN PAM
acccaccucauucccuucuu

SEQ ID NO: 21944 - RNA, 20 nt, Artificial Sequence
  targeting sequence with TTCN PAM
ugccccucguccugcugcca

SEQ ID NO: 21945 - RNA, 20 nt, Artificial Sequence
  targeting sequence with TTCN PAM
ccuggacuguguccucguca

SEQ ID NO: 21946 - RNA, 20 nt, Artificial Sequence
  targeting sequence with TTCN PAM
ugguggauguggugcguggg

SEQ ID NO: 21947 - RNA, 20 nt, Artificial Sequence
  targeting sequence with TTCN PAM
cccaagauugccauccugac

SEQ ID NO: 21948 - RNA, 20 nt, Artificial Sequence
  targeting sequence with TTCN PAM
ucugccaggacuuuaagauu

SEQ ID NO: 21949 - RNA, 20 nt, Artificial Sequence
  targeting sequence with TTCN PAM
gcagcaaagucuugcugacu

SEQ ID NO: 21950 - RNA, 20 nt, Artificial Sequence
  targeting sequence with TTCN PAM
uaacccuuggcaguccugac

SEQ ID NO: 21951 - RNA, 20 nt, Artificial Sequence
  targeting sequence with TTCN PAM
caagacaaaggcuguucauc

SEQ ID NO: 21952 - RNA, 20 nt, Artificial Sequence
  targeting sequence with TTCN PAM
ucugucgccucugccuccgg

SEQ ID NO: 21953 - RNA, 20 nt, Artificial Sequence
  targeting sequence with TTCN PAM
cccuccucucugggccaaaa

SEQ ID NO: 21954 - RNA, 20 nt, Artificial Sequence
  targeting sequence with TTCN PAM
aagacugggucugaugcuuu

SEQ ID NO: 21955 - RNA, 20 nt, Artificial Sequence
  targeting sequence with TTCN PAM
aaauuuacauugucuugugc

SEQ ID NO: 21956 - RNA, 20 nt, Artificial Sequence
  targeting sequence with TTCN PAM
aaaggcaaccaaaaauucca

SEQ ID NO: 21957 - RNA, 20 nt, Artificial Sequence
  targeting sequence with TTCN PAM
ugcacaagacaauguaaauu

SEQ ID NO: 21958 - RNA, 20 nt, Artificial Sequence
  targeting sequence with TTCN PAM
caaggcgguggugacuucau

SEQ ID NO: 21959 - RNA, 20 nt, Artificial Sequence
  targeting sequence with TTCN PAM
uguuugaaauccaacagcaa

SEQ ID NO: 21960 - RNA, 20 nt, Artificial Sequence
  targeting sequence with TTCN PAM
aacaugaagucaccaccgcc

SEQ ID NO: 21961 - RNA, 20 nt, Artificial Sequence
  targeting sequence with TTCN PAM
guggggucuauuuuuaaaac

SEQ ID NO: 21962 - RNA, 20 nt, Artificial Sequence
  targeting sequence with TTCN PAM
gggaaggagcaccagcuuuc

SEQ ID NO: 21963 - RNA, 20 nt, Artificial Sequence
  targeting sequence with TTCN PAM
ccgaaccacaccaacugcuu

SEQ ID NO: 21964 - RNA, 20 nt, Artificial Sequence
  targeting sequence with TTCN PAM
guccugacucugccaucuca

SEQ ID NO: 21965 - RNA, 20 nt, Artificial Sequence
  targeting sequence with TTCN PAM
cucuuuggggccucauuucu

SEQ ID NO: 21966 - RNA, 20 nt, Artificial Sequence
  targeting sequence with TTCN PAM
uuucugugaaaugggguuaa

SEQ ID NO: 21967 - RNA, 20 nt, Artificial Sequence
  targeting sequence with TTCN PAM
gugaaaugggguuaauuaua

SEQ ID NO: 21968 - RNA, 20 nt, Artificial Sequence
  targeting sequence with TTCN PAM
cagaaaagaaaugaggcccc

SEQ ID NO: 21969 - RNA, 20 nt, Artificial Sequence
  targeting sequence with TTCN PAM
gguuucgucaagccaaauuu

SEQ ID NO: 21970 - RNA, 20 nt, Artificial Sequence
  targeting sequence with TTCN PAM
ucaagccaaauuucuauuau

SEQ ID NO: 21971 - RNA, 20 nt, Artificial Sequence
  targeting sequence with TTCN PAM
auuauuauuucuccuuauua

SEQ ID NO: 21972 - RNA, 20 nt, Artificial Sequence
  targeting sequence with TTCN PAM
ccuuauuacugacucauaaa

SEQ ID NO: 21973 - RNA, 20 nt, Artificial Sequence
  targeting sequence with TTCN PAM
aaaguccgucaguaaguaca

SEQ ID NO: 21974 - RNA, 20 nt, Artificial Sequence
  targeting sequence with TTCN PAM
uuucuaaaguccgucaguaa

SEQ ID NO: 21975 - RNA, 20 nt, Artificial Sequence
  targeting sequence with TTCN PAM
uaaagcacacaaugagcuuu

SEQ ID NO: 21976 - RNA, 20 nt, Artificial Sequence
  targeting sequence with TTCN PAM
ggaguuugagaaagcuucca

SEQ ID NO: 21977 - RNA, 20 nt, Artificial Sequence
  targeting sequence with TTCN PAM
caaacuccugaaagcuuuuc

SEQ ID NO: 21978 - RNA, 20 nt, Artificial Sequence
  targeting sequence with TTCN PAM
aggagauggugaaacuugau

SEQ ID NO: 21979 - RNA, 20 nt, Artificial Sequence
  targeting sequence with TTCN PAM
ccaucuccuggaagcuuucu

SEQ ID NO: 21980 - RNA, 20 nt, Artificial Sequence
  targeting sequence with TTCN PAM
agaccucucagggcucagau

SEQ ID NO: 21981 - RNA, 20 nt, Artificial Sequence
  targeting sequence with TTCN PAM
uuuccagaccucucagggcu

SEQ ID NO: 21982 - RNA, 20 nt, Artificial Sequence
  targeting sequence with TTCN PAM
cugcuccacucuuccuuucc

SEQ ID NO: 21983 - RNA, 20 nt, Artificial Sequence
  targeting sequence with TTCN PAM
aacaaagggaaagguggggg

SEQ ID NO: 21984 - RNA, 20 nt, Artificial Sequence
  targeting sequence with TTCN PAM
cuuuguuugaaaagcuuccc

SEQ ID NO: 21985 - RNA, 20 nt, Artificial Sequence
  targeting sequence with TTCN PAM
uacccccaccuuucccuuug

SEQ ID NO: 21986 - RNA, 20 nt, Artificial Sequence
  targeting sequence with TTCN PAM
cagcaccagcuccucaccau

SEQ ID NO: 21987 - RNA, 20 nt, Artificial Sequence
  targeting sequence with TTCN PAM
cuguauuuucucagcaccag

SEQ ID NO: 21988 - RNA, 20 nt, Artificial Sequence
  targeting sequence with TTCN PAM
uuauuuuuggagcacaucuc

SEQ ID NO: 21989 - RNA, 20 nt, Artificial Sequence
  targeting sequence with TTCN PAM
guuuagauguccugcccagc

SEQ ID NO: 21990 - RNA, 20 nt, Artificial Sequence
  targeting sequence with TTCN PAM
aggucaccugcuccguagcc

SEQ ID NO: 21991 - RNA, 20 nt, Artificial Sequence
  targeting sequence with TTCN PAM
accaugccaucucuccucau

SEQ ID NO: 21992 - RNA, 20 nt, Artificial Sequence
  targeting sequence with TTCN PAM
aagugcuuaucuuuuccacc

SEQ ID NO: 21993 - RNA, 20 nt, Artificial Sequence
  targeting sequence with TTCN PAM
uucaauucuaaagcuaaaaa

SEQ ID NO: 21994 - RNA, 20 nt, Artificial Sequence
  targeting sequence with TTCN PAM
auucuaaagcuaaaaaaugg

SEQ ID NO: 21995 - RNA, 20 nt, Artificial Sequence
  targeting sequence with TTCN PAM
aaagcuaaaaaaugggacug

SEQ ID NO: 21996 - RNA, 20 nt, Artificial Sequence
  targeting sequence with TTCN PAM
agucccauuuuuuagcuuua

SEQ ID NO: 21997 - RNA, 20 nt, Artificial Sequence
  targeting sequence with TTCN PAM
aagacagacaaaagccccaa

SEQ ID NO: 21998 - RNA, 20 nt, Artificial Sequence
  targeting sequence with TTCN PAM
ccauuuggggcuuuugucug

SEQ ID NO: 21999 - RNA, 20 nt, Artificial Sequence
  targeting sequence with TTCN PAM
agcuccacauuugggaacca

SEQ ID NO: 22000 - RNA, 20 nt, Artificial Sequence
  targeting sequence with TTCN PAM
caaauguggagcuugaagua

SEQ ID NO: 22001 - RNA, 20 nt, Artificial Sequence
  targeting sequence with TTCN PAM
cuucccugcccaggaagcca

SEQ ID NO: 22002 - RNA, 20 nt, Artificial Sequence
  targeting sequence with TTCN PAM
cugcccaggaagccaggaga

SEQ ID NO: 22003 - RNA, 20 nt, Artificial Sequence
  targeting sequence with TTCN PAM
ugggcagggaagagaaauca

SEQ ID NO: 22004 - RNA, 20 nt, Artificial Sequence
  targeting sequence with TTCN PAM
guggccugcaucucuccugg

SEQ ID NO: 22005 - RNA, 20 nt, Artificial Sequence
  targeting sequence with TTCN PAM
uuguuaaagaugucauggcc

SEQ ID NO: 22006 - RNA, 20 nt, Artificial Sequence
  targeting sequence with TTCN PAM
caggccugcacgcacauaug

SEQ ID NO: 22007 - RNA, 20 nt, Artificial Sequence
  targeting sequence with TTCN PAM
ugccacauguaugcacgcgu

SEQ ID NO: 22008 - RNA, 20 nt, Artificial Sequence
  targeting sequence with TTCN PAM
gugccccuuccugccacaug

SEQ ID NO: 22009 - RNA, 20 nt, Artificial Sequence
  targeting sequence with TTCN PAM
cccuggcuacagcccaggag

SEQ ID NO: 22010 - RNA, 20 nt, Artificial Sequence
  targeting sequence with TTCN PAM
uagguuuauaaaaggcuuuu

SEQ ID NO: 22011 - RNA, 20 nt, Artificial Sequence
  targeting sequence with TTCN PAM
cuuucuuagguuuauaaaag

SEQ ID NO: 22012 - RNA, 20 nt, Artificial Sequence
  targeting sequence with TTCN PAM
uaacgacuucucuuucuuag

SEQ ID NO: 22013 - RNA, 20 nt, Artificial Sequence
  targeting sequence with TTCN PAM
ugggcacucacagcaaggca

SEQ ID NO: 22014 - RNA, 20 nt, Artificial Sequence
  targeting sequence with TTCN PAM
agaggcuuccaggguaacuu

SEQ ID NO: 22015 - RNA, 20 nt, Artificial Sequence
  targeting sequence with TTCN PAM
aggguaacuuggagcaaauc

SEQ ID NO: 22016 - RNA, 20 nt, Artificial Sequence
  targeting sequence with TTCN PAM
uggacucagucccuggaaga

SEQ ID NO: 22017 - RNA, 20 nt, Artificial Sequence
  targeting sequence with TTCN PAM
agggacugaguccaagaaag

SEQ ID NO: 22018 - RNA, 20 nt, Artificial Sequence
  targeting sequence with TTCN PAM
uccagggacugaguccaaga

SEQ ID NO: 22019 - RNA, 20 nt, Artificial Sequence
  targeting sequence with TTCN PAM
agaccgcuuccucccacgaa

SEQ ID NO: 22020 - RNA, 20 nt, Artificial Sequence
  targeting sequence with TTCN PAM
ucccacgaacucauucauug

SEQ ID NO: 22021 - RNA, 20 nt, Artificial Sequence
  targeting sequence with TTCN PAM
ugggaggaagcggucuggaa

SEQ ID NO: 22022 - RNA, 20 nt, Artificial Sequence
  targeting sequence with TTCN PAM
uugugucagcaaacguagac

SEQ ID NO: 22023 - RNA, 20 nt, Artificial Sequence
  targeting sequence with TTCN PAM
gcugagggaggccgauacaa

SEQ ID NO: 22024 - RNA, 20 nt, Artificial Sequence
  targeting sequence with TTCN PAM
cacagcaaagccgugcacag

SEQ ID NO: 22025 - RNA, 20 nt, Artificial Sequence
  targeting sequence with TTCN PAM
ucugcccuuuguccagaucg

SEQ ID NO: 22026 - RNA, 20 nt, Artificial Sequence
  targeting sequence with TTCN PAM
ccuggggugggggcuugagg

SEQ ID NO: 22027 - RNA, 20 nt, Artificial Sequence
  targeting sequence with TTCN PAM
gcagaguccucccaagcccc

SEQ ID NO: 22028 - RNA, 20 nt, Artificial Sequence
  targeting sequence with TTCN PAM
acagggccuugaaagccaaa

SEQ ID NO: 22029 - RNA, 20 nt, Artificial Sequence
  targeting sequence with TTCN PAM
aggcccuguugaaaugucac

SEQ ID NO: 22030 - RNA, 20 nt, Artificial Sequence
  targeting sequence with TTCN PAM
agaggcagaguggggagggg

SEQ ID NO: 22031 - RNA, 20 nt, Artificial Sequence
  targeting sequence with TTCN PAM
aggugagggugacauccuau

SEQ ID NO: 22032 - RNA, 20 nt, Artificial Sequence
  targeting sequence with TTCN PAM
caccuacaggccugccucgc

SEQ ID NO: 22033 - RNA, 20 nt, Artificial Sequence
  targeting sequence with TTCN PAM
uuccauggcucugaaaacag

SEQ ID NO: 22034 - RNA, 20 nt, Artificial Sequence
  targeting sequence with TTCN PAM
auggcucugaaaacagucuu

SEQ ID NO: 22035 - RNA, 20 nt, Artificial Sequence
  targeting sequence with TTCN PAM
gagccauggaaagaaccaga

SEQ ID NO: 22036 - RNA, 20 nt, Artificial Sequence
  targeting sequence with TTCN PAM
uuuuuucccuugaugaaauc

SEQ ID NO: 22037 - RNA, 20 nt, Artificial Sequence
  targeting sequence with TTCN PAM
cuugaugaaauccugcaguc

SEQ ID NO: 22038 - RNA, 20 nt, Artificial Sequence
  targeting sequence with TTCN PAM
ucaagggaaaaaaagaagac

SEQ ID NO: 22039 - RNA, 20 nt, Artificial Sequence
  targeting sequence with TTCN PAM
uauccagguacugguacaug

SEQ ID NO: 22040 - RNA, 20 nt, Artificial Sequence
  targeting sequence with TTCN PAM
aggaagccuaccagauugcu

SEQ ID NO: 22041 - RNA, 20 nt, Artificial Sequence
  targeting sequence with TTCN PAM
uugaacaguuuccuauccag

SEQ ID NO: 22042 - RNA, 20 nt, Artificial Sequence
  targeting sequence with TTCN PAM
cgccaaucagugucugugac

SEQ ID NO: 22043 - RNA, 20 nt, Artificial Sequence
  targeting sequence with TTCN PAM
auggccaguucacgccaauc

SEQ ID NO: 22044 - RNA, 20 nt, Artificial Sequence
  targeting sequence with TTCN PAM
agcgcuuccauggccaguuc

SEQ ID NO: 22045 - RNA, 20 nt, Artificial Sequence
  targeting sequence with TTCN PAM
aaaucuaaaccuucuagcgc

SEQ ID NO: 22046 - RNA, 20 nt, Artificial Sequence
  targeting sequence with TTCN PAM
uugcuguuucaaaaucuaaa

SEQ ID NO: 22047 - RNA, 20 nt, Artificial Sequence
  targeting sequence with TTCN PAM
uaagggaccccacaaggacc

SEQ ID NO: 22048 - RNA, 20 nt, Artificial Sequence
  targeting sequence with TTCN PAM
uggacuugauucguuguguc

SEQ ID NO: 22049 - RNA, 20 nt, Artificial Sequence
  targeting sequence with TTCN PAM
uuguguccuuuccuggccua

SEQ ID NO: 22050 - RNA, 20 nt, Artificial Sequence
  targeting sequence with TTCN PAM
uggccuagucuaugaaagcu

SEQ ID NO: 22051 - RNA, 20 nt, Artificial Sequence
  targeting sequence with TTCN PAM
uagacuaggccaggaaagga

SEQ ID NO: 22052 - RNA, 20 nt, Artificial Sequence
  targeting sequence with TTCN PAM
gccaucucucuagcuuucau

SEQ ID NO: 22053 - RNA, 20 nt, Artificial Sequence
  targeting sequence with TTCN PAM
agauggaaacacagcucagg

SEQ ID NO: 22054 - RNA, 20 nt, Artificial Sequence
  targeting sequence with TTCN PAM
uccaucugagguucuagaug

SEQ ID NO: 22055 - RNA, 20 nt, Artificial Sequence
  targeting sequence with TTCN PAM
uuccuccaucugagguucua

SEQ ID NO: 22056 - RNA, 20 nt, Artificial Sequence
  targeting sequence with TTCN PAM
aaccuccacuccccuacccc

SEQ ID NO: 22057 - RNA, 20 nt, Artificial Sequence
  targeting sequence with TTCN PAM
cucuuuaucuccccacaguc

SEQ ID NO: 22058 - RNA, 20 nt, Artificial Sequence
  targeting sequence with TTCN PAM
cgggcugacauugaaggagu

SEQ ID NO: 22059 - RNA, 20 nt, Artificial Sequence
  targeting sequence with TTCN PAM
augucagcccgggaauaugg

SEQ ID NO: 22060 - RNA, 20 nt, Artificial Sequence
  targeting sequence with TTCN PAM
ugccuacaagucuugaucua

SEQ ID NO: 22061 - RNA, 20 nt, Artificial Sequence
  targeting sequence with TTCN PAM
uaguccuggucugguccagu

SEQ ID NO: 22062 - RNA, 20 nt, Artificial Sequence
  targeting sequence with TTCN PAM
cagccaggcuucuuaguccu

SEQ ID NO: 22063 - RNA, 20 nt, Artificial Sequence
  targeting sequence with TTCN PAM
uuggagccccaguccuccca

SEQ ID NO: 22064 - RNA, 20 nt, Artificial Sequence
  targeting sequence with TTCN PAM
gaaauggggguggugagaau

SEQ ID NO: 22065 - RNA, 20 nt, Artificial Sequence
  targeting sequence with TTCN PAM
gaacugggaggacuggggcu

SEQ ID NO: 22066 - RNA, 20 nt, Artificial Sequence
  targeting sequence with TTCN PAM
ccuuuacaacaucucaguua

SEQ ID NO: 22067 - RNA, 20 nt, Artificial Sequence
  targeting sequence with TTCN PAM
cuuguuuaguaauggcuagc

SEQ ID NO: 22068 - RNA, 20 nt, Artificial Sequence
  targeting sequence with TTCN PAM
uacacugaggacaucuaaaa

SEQ ID NO: 22069 - RNA, 20 nt, Artificial Sequence
  targeting sequence with TTCN PAM
uacagccuccuccaucucca

SEQ ID NO: 22070 - RNA, 20 nt, Artificial Sequence
  targeting sequence with TTCN PAM
gaggaggggccaggcgcggu

SEQ ID NO: 22071 - RNA, 20 nt, Artificial Sequence
  targeting sequence with TTCN PAM
uuuuuuuuuuuuuuuuuaag

SEQ ID NO: 22072 - RNA, 20 nt, Artificial Sequence
  targeting sequence with TTCN PAM
gaggagggaggaggcaucuc

SEQ ID NO: 22073 - RNA, 20 nt, Artificial Sequence
  targeting sequence with TTCN PAM
cucuccugccccacccagaa

SEQ ID NO: 22074 - RNA, 20 nt, Artificial Sequence
  targeting sequence with TTCN PAM
ggguggggcaggagagggaa

SEQ ID NO: 22075 - RNA, 20 nt, Artificial Sequence
  targeting sequence with TTCN PAM
agggauuugucgucucccuc

SEQ ID NO: 22076 - RNA, 20 nt, Artificial Sequence
  targeting sequence with TTCN PAM
auucuagggauuugucgucu

SEQ ID NO: 22077 - RNA, 20 nt, Artificial Sequence
  targeting sequence with TTCN PAM
agaccugccugggcaacaca

SEQ ID NO: 22078 - RNA, 20 nt, Artificial Sequence
  targeting sequence with TTCN PAM
ugccucagccucccaaagug

SEQ ID NO: 22079 - RNA, 20 nt, Artificial Sequence
  targeting sequence with TTCN PAM
acuauaguaaaucuggcugg

SEQ ID NO: 22080 - RNA, 20 nt, Artificial Sequence
  targeting sequence with TTCN PAM
aaacagcauguuguacacaa

SEQ ID NO: 22081 - RNA, 20 nt, Artificial Sequence
  targeting sequence with TTCN PAM
auaucauguggcuuuuucaa

SEQ ID NO: 22082 - RNA, 20 nt, Artificial Sequence
  targeting sequence with TTCN PAM
ucuaaaucccgaguacccca

SEQ ID NO: 22083 - RNA, 20 nt, Artificial Sequence
  targeting sequence with TTCN PAM
uagagauggacagccauccc

SEQ ID NO: 22084 - RNA, 20 nt, Artificial Sequence
  targeting sequence with TTCN PAM
cugccaucuaguggggaugg

SEQ ID NO: 22085 - RNA, 20 nt, Artificial Sequence
  targeting sequence with TTCN PAM
ucccuauucccaggcuuccc

SEQ ID NO: 22086 - RNA, 20 nt, Artificial Sequence
  targeting sequence with TTCN PAM
caggcuucccucugcugagc

SEQ ID NO: 22087 - RNA, 20 nt, Artificial Sequence
  targeting sequence with TTCN PAM
cucugcugagcucauucagg

SEQ ID NO: 22088 - RNA, 20 nt, Artificial Sequence
  targeting sequence with TTCN PAM
ggggccuugugacucugacc

SEQ ID NO: 22089 - RNA, 20 nt, Artificial Sequence
  targeting sequence with TTCN PAM
accugacacauuuugcagcg

SEQ ID NO: 22090 - RNA, 20 nt, Artificial Sequence
  targeting sequence with TTCN PAM
uucaaccugacacauuuugc

SEQ ID NO: 22091 - RNA, 20 nt, Artificial Sequence
  targeting sequence with TTCN PAM
gaguuccuucaaccugacac

SEQ ID NO: 22092 - RNA, 20 nt, Artificial Sequence
  targeting sequence with TTCN PAM
agcuguagcucagcugugcu

SEQ ID NO: 22093 - RNA, 20 nt, Artificial Sequence
  targeting sequence with TTCN PAM
acaaagaagaugguuggagc

SEQ ID NO: 22094 - RNA, 20 nt, Artificial Sequence
  targeting sequence with TTCN PAM
uuguggaaaggggccugcua

SEQ ID NO: 22095 - RNA, 20 nt, Artificial Sequence
  targeting sequence with TTCN PAM
gggcuccaaccaucuucuuu

SEQ ID NO: 22096 - RNA, 20 nt, Artificial Sequence
  targeting sequence with TTCN PAM
cugcuucugggcuccaacca

SEQ ID NO: 22097 - RNA, 20 nt, Artificial Sequence
  targeting sequence with TTCN PAM
aggucugaguccucgcucug

SEQ ID NO: 22098 - RNA, 20 nt, Artificial Sequence
  targeting sequence with TTCN PAM
cucuuggccacugugcuggg

SEQ ID NO: 22099 - RNA, 20 nt, Artificial Sequence
  targeting sequence with TTCN PAM
uuaaagcgccuugagagggc

SEQ ID NO: 22100 - RNA, 20 nt, Artificial Sequence
  targeting sequence with TTCN PAM
uuggcccaugugaugcccgc

SEQ ID NO: 22101 - RNA, 20 nt, Artificial Sequence
  targeting sequence with TTCN PAM
acgaauuccucuucacaaac

SEQ ID NO: 22102 - RNA, 20 nt, Artificial Sequence
  targeting sequence with TTCN PAM
uagaaaagggcaaugcgggc

SEQ ID NO: 22103 - RNA, 20 nt, Artificial Sequence
  targeting sequence with TTCN PAM
ucuucacaaacacuuguuug

SEQ ID NO: 22104 - RNA, 20 nt, Artificial Sequence
  targeting sequence with TTCN PAM
caaacacuuguuugccaggu

SEQ ID NO: 22105 - RNA, 20 nt, Artificial Sequence
  targeting sequence with TTCN PAM
gacucugaugccucccuuaa

SEQ ID NO: 22106 - RNA, 20 nt, Artificial Sequence
  targeting sequence with TTCN PAM
uccguguucuccaggcaugu

SEQ ID NO: 22107 - RNA, 20 nt, Artificial Sequence
  targeting sequence with TTCN PAM
ccaggcaugugguucguagu

SEQ ID NO: 22108 - RNA, 20 nt, Artificial Sequence
  targeting sequence with TTCN PAM
uaguuggagagcucuuagcu

SEQ ID NO: 22109 - RNA, 20 nt, Artificial Sequence
  targeting sequence with TTCN PAM
cuguuagaauguggaccucu

SEQ ID NO: 22110 - RNA, 20 nt, Artificial Sequence
  targeting sequence with TTCN PAM
aacagggaaagcuggucaau

SEQ ID NO: 22111 - RNA, 20 nt, Artificial Sequence
  targeting sequence with TTCN PAM
gagguccacauucuaacagg

SEQ ID NO: 22112 - RNA, 20 nt, Artificial Sequence
  targeting sequence with TTCN PAM
cccuggguccucagucucuu

SEQ ID NO: 22113 - RNA, 20 nt, Artificial Sequence
  targeting sequence with TTCN PAM
ugucaagagacugaggaccc

SEQ ID NO: 22114 - RNA, 20 nt, Artificial Sequence
  targeting sequence with TTCN PAM
ucccacaggaccaggcuucc

SEQ ID NO: 22115 - RNA, 20 nt, Artificial Sequence
  targeting sequence with TTCN PAM
ggagggaggaugccaugcug

SEQ ID NO: 22116 - RNA, 20 nt, Artificial Sequence
  targeting sequence with TTCN PAM
guucaaagggcucuggagcu

SEQ ID NO: 22117 - RNA, 20 nt, Artificial Sequence
  targeting sequence with TTCN PAM
aagggcucuggagcugcugc

SEQ ID NO: 22118 - RNA, 20 nt, Artificial Sequence
  targeting sequence with TTCN PAM
aaaugggcugaccugugccu

SEQ ID NO: 22119 - RNA, 20 nt, Artificial Sequence
  targeting sequence with TTCN PAM
gguggcuuugcugucaccau

SEQ ID NO: 22120 - RNA, 20 nt, Artificial Sequence
  targeting sequence with TTCN PAM
gcccaggguuuggaggagca

SEQ ID NO: 22121 - RNA, 20 nt, Artificial Sequence
  targeting sequence with TTCN PAM
gauucugcccaggguuugga

SEQ ID NO: 22122 - RNA, 20 nt, Artificial Sequence
  targeting sequence with TTCN PAM
ucagaaacuucuagaggucc

SEQ ID NO: 22123 - RNA, 20 nt, Artificial Sequence
  targeting sequence with TTCN PAM
gaggaacaagcagacuggug

SEQ ID NO: 22124 - RNA, 20 nt, Artificial Sequence
  targeting sequence with TTCN PAM
agagguccaugaguuaaagu

SEQ ID NO: 22125 - RNA, 20 nt, Artificial Sequence
  targeting sequence with TTCN PAM
aggcaagggcugcaauuuua

SEQ ID NO: 22126 - RNA, 20 nt, Artificial Sequence
  targeting sequence with TTCN PAM
acagacuuggugggauucau

SEQ ID NO: 22127 - RNA, 20 nt, Artificial Sequence
  targeting sequence with TTCN PAM
uucccuaccccuccaccuuc

SEQ ID NO: 22128 - RNA, 20 nt, Artificial Sequence
  targeting sequence with TTCN PAM
cuaccccuccaccuucuucc

SEQ ID NO: 22129 - RNA, 20 nt, Artificial Sequence
  targeting sequence with TTCN PAM
uccagaaucugucuuuauac

SEQ ID NO: 22130 - RNA, 20 nt, Artificial Sequence
  targeting sequence with TTCN PAM
agaaucugucuuuauacccu

SEQ ID NO: 22131 - RNA, 20 nt, Artificial Sequence
  targeting sequence with TTCN PAM
ggaagaagguggagggguag

SEQ ID NO: 22132 - RNA, 20 nt, Artificial Sequence
  targeting sequence with TTCN PAM
ccuccucugcucccucugug

SEQ ID NO: 22133 - RNA, 20 nt, Artificial Sequence
  targeting sequence with TTCN PAM
acccauguugccaagaugua

SEQ ID NO: 22134 - RNA, 20 nt, Artificial Sequence
  targeting sequence with TTCN PAM
ucuuugggucuagagucucc

SEQ ID NO: 22135 - RNA, 20 nt, Artificial Sequence
  targeting sequence with TTCN PAM
uugggucuagagucucccaa

SEQ ID NO: 22136 - RNA, 20 nt, Artificial Sequence
  targeting sequence with TTCN PAM
uuacaugguccaaucccaug

SEQ ID NO: 22137 - RNA, 20 nt, Artificial Sequence
  targeting sequence with TTCN PAM
ucuccucuguggcucacugu

SEQ ID NO: 22138 - RNA, 20 nt, Artificial Sequence
  targeting sequence with TTCN PAM
caccccuagccaaucaccca

SEQ ID NO: 22139 - RNA, 20 nt, Artificial Sequence
  targeting sequence with TTCN PAM
aaagugggugauuggcuagg

SEQ ID NO: 22140 - RNA, 20 nt, Artificial Sequence
  targeting sequence with TTCN PAM
uggcuucaaaagugggugau

SEQ ID NO: 22141 - RNA, 20 nt, Artificial Sequence
  targeting sequence with TTCN PAM
uuauuucuucgccacaggcc

SEQ ID NO: 22142 - RNA, 20 nt, Artificial Sequence
  targeting sequence with TTCN PAM
ucgccacaggccuucaucag

SEQ ID NO: 22143 - RNA, 20 nt, Artificial Sequence
  targeting sequence with TTCN PAM
ccacaggccuucaucagagu

SEQ ID NO: 22144 - RNA, 20 nt, Artificial Sequence
  targeting sequence with TTCN PAM
ucagaguacaagaccuccga

SEQ ID NO: 22145 - RNA, 20 nt, Artificial Sequence
  targeting sequence with TTCN PAM
ucuuuuaccucaaugcugcu

SEQ ID NO: 22146 - RNA, 20 nt, Artificial Sequence
  targeting sequence with TTCN PAM
uucucaagaaggcauacuug

SEQ ID NO: 22147 - RNA, 20 nt, Artificial Sequence
  targeting sequence with TTCN PAM
caagaaggcauacuuggggu

SEQ ID NO: 22148 - RNA, 20 nt, Artificial Sequence
  targeting sequence with TTCN PAM
ugagaaggaaaaaugcuuca

SEQ ID NO: 22149 - RNA, 20 nt, Artificial Sequence
  targeting sequence with TTCN PAM
uguuuuaggggcagcccuuc

SEQ ID NO: 22150 - RNA, 20 nt, Artificial Sequence
  targeting sequence with TTCN PAM
aacaggcaagagccuugagg

SEQ ID NO: 22151 - RNA, 20 nt, Artificial Sequence
  targeting sequence with TTCN PAM
cauguccucaaggcucuugc

SEQ ID NO: 22152 - RNA, 20 nt, Artificial Sequence
  targeting sequence with TTCN PAM
ggaucucuccaggguugggu

SEQ ID NO: 22153 - RNA, 20 nt, Artificial Sequence
  targeting sequence with TTCN PAM
agucugugaaaagggauugg

SEQ ID NO: 22154 - RNA, 20 nt, Artificial Sequence
  targeting sequence with TTCN PAM
cagacuagaaacccaacccu

SEQ ID NO: 22155 - RNA, 20 nt, Artificial Sequence
  targeting sequence with TTCN PAM
caaaugcacaugagcugagc

SEQ ID NO: 22156 - RNA, 20 nt, Artificial Sequence
  targeting sequence with TTCN PAM
ccagaaauggaccuggggag

SEQ ID NO: 22157 - RNA, 20 nt, Artificial Sequence
  targeting sequence with TTCN PAM
ggggaauggagcucagcuca

SEQ ID NO: 22158 - RNA, 20 nt, Artificial Sequence
  targeting sequence with TTCN PAM
gacugugggccuugcucccc

SEQ ID NO: 22159 - RNA, 20 nt, Artificial Sequence
  targeting sequence with TTCN PAM
ggagcaaccccuagcccuac

SEQ ID NO: 22160 - RNA, 20 nt, Artificial Sequence
  targeting sequence with TTCN PAM
ggcugagaauauugaccuug

SEQ ID NO: 22161 - RNA, 20 nt, Artificial Sequence
  targeting sequence with TTCN PAM
cagccagaaacaguagggcu

SEQ ID NO: 22162 - RNA, 20 nt, Artificial Sequence
  targeting sequence with TTCN PAM
uuagcacacugcaggccuau

SEQ ID NO: 22163 - RNA, 20 nt, Artificial Sequence
  targeting sequence with TTCN PAM
uuuuuuuuuuuuuuuuucug

SEQ ID NO: 22164 - RNA, 20 nt, Artificial Sequence
  targeting sequence with TTCN PAM
uaauuucuguguaucucagu

SEQ ID NO: 22165 - RNA, 20 nt, Artificial Sequence
  targeting sequence with TTCN PAM
guguaucucagugcugucug

SEQ ID NO: 22166 - RNA, 20 nt, Artificial Sequence
  targeting sequence with TTCN PAM
ccugaacauauuuauuguga

SEQ ID NO: 22167 - RNA, 20 nt, Artificial Sequence
  targeting sequence with TTCN PAM
ggagaaaaaauguauaugcc

SEQ ID NO: 22168 - RNA, 20 nt, Artificial Sequence
  targeting sequence with TTCN PAM
caauaaauauguucaggaga

SEQ ID NO: 22169 - RNA, 20 nt, Artificial Sequence
  targeting sequence with TTCN PAM
cauaccuucacaauaaauau

SEQ ID NO: 22170 - RNA, 20 nt, Artificial Sequence
  targeting sequence with TTCN PAM
aauguaucucacauucccau

SEQ ID NO: 22171 - RNA, 20 nt, Artificial Sequence
  targeting sequence with TTCN PAM
caguuggaaacagugaggaa

SEQ ID NO: 22172 - RNA, 20 nt, Artificial Sequence
  targeting sequence with TTCN PAM
aacugggaauucaaauguau

SEQ ID NO: 22173 - RNA, 20 nt, Artificial Sequence
  targeting sequence with TTCN PAM
ucacuguuuccaacugggaa

SEQ ID NO: 22174 - RNA, 20 nt, Artificial Sequence
  targeting sequence with TTCN PAM
uuuccccauaauaaacaccu

SEQ ID NO: 22175 - RNA, 20 nt, Artificial Sequence
  targeting sequence with TTCN PAM
ccauaauaaacaccugucau

SEQ ID NO: 22176 - RNA, 20 nt, Artificial Sequence
  targeting sequence with TTCN PAM
augcaggaggaaauuaaggc

SEQ ID NO: 22177 - RNA, 20 nt, Artificial Sequence
  targeting sequence with TTCN PAM
uccugcauggaauagggaga

SEQ ID NO: 22178 - RNA, 20 nt, Artificial Sequence
  targeting sequence with TTCN PAM
accaaguuuuuggcuaugga

SEQ ID NO: 22179 - RNA, 20 nt, Artificial Sequence
  targeting sequence with TTCN PAM
agcccagucuauuuccuaag

SEQ ID NO: 22180 - RNA, 20 nt, Artificial Sequence
  targeting sequence with TTCN PAM
uaagcucaugcucucucggc

SEQ ID NO: 22181 - RNA, 20 nt, Artificial Sequence
  targeting sequence with TTCN PAM
gggguuuaccuacccgcgug

SEQ ID NO: 22182 - RNA, 20 nt, Artificial Sequence
  targeting sequence with TTCN PAM
gagcuauugcucaaaaugcc

SEQ ID NO: 22183 - RNA, 20 nt, Artificial Sequence
  targeting sequence with TTCN PAM
cuuguaaauccacuggccug

SEQ ID NO: 22184 - RNA, 20 nt, Artificial Sequence
  targeting sequence with TTCN PAM
ccugaagccaaggagcauaa

SEQ ID NO: 22185 - RNA, 20 nt, Artificial Sequence
  targeting sequence with TTCN PAM
ggugaagacccccagaucca

SEQ ID NO: 22186 - RNA, 20 nt, Artificial Sequence
  targeting sequence with TTCN PAM
ucucuacaaaaguaacugcu

SEQ ID NO: 22187 - RNA, 20 nt, Artificial Sequence
  targeting sequence with TTCN PAM
cagcucauagcauacgagga

SEQ ID NO: 22188 - RNA, 20 nt, Artificial Sequence
  targeting sequence with TTCN PAM
agagacaaucuuaggaguuu

SEQ ID NO: 22189 - RNA, 20 nt, Artificial Sequence
  targeting sequence with TTCN PAM
agagaacugcagauccuuag

SEQ ID NO: 22190 - RNA, 20 nt, Artificial Sequence
  targeting sequence with TTCN PAM
cuggaauuaugcugagcacc

SEQ ID NO: 22191 - RNA, 20 nt, Artificial Sequence
  targeting sequence with TTCN PAM
uguccugcugacggggggaa

SEQ ID NO: 22192 - RNA, 20 nt, Artificial Sequence
  targeting sequence with TTCN PAM
ccccgucagcaggacaagaa

SEQ ID NO: 22193 - RNA, 20 nt, Artificial Sequence
  targeting sequence with TTCN PAM
uuccccccgucagcaggaca

SEQ ID NO: 22194 - RNA, 20 nt, Artificial Sequence
  targeting sequence with TTCN PAM
aggccccaggauaucaccau

SEQ ID NO: 22195 - RNA, 20 nt, Artificial Sequence
  targeting sequence with TTCN PAM
ggccauauccauucuaggcc

SEQ ID NO: 22196 - RNA, 20 nt, Artificial Sequence
  targeting sequence with TTCN PAM
ugucuaguaaaaccuuuuuu

SEQ ID NO: 22197 - RNA, 20 nt, Artificial Sequence
  targeting sequence with TTCN PAM
auucauuuccaacuauuagg

SEQ ID NO: 22198 - RNA, 20 nt, Artificial Sequence
  targeting sequence with TTCN PAM
uuuccaacuauuaggaguua

SEQ ID NO: 22199 - RNA, 20 nt, Artificial Sequence
  targeting sequence with TTCN PAM
aacuauuaggaguuaguuug

SEQ ID NO: 22200 - RNA, 20 nt, Artificial Sequence
  targeting sequence with TTCN PAM
aaaaaccugcacacagcuca

SEQ ID NO: 22201 - RNA, 20 nt, Artificial Sequence
  targeting sequence with TTCN PAM
gucaguauggaagcauguug

SEQ ID NO: 22202 - RNA, 20 nt, Artificial Sequence
  targeting sequence with TTCN PAM
auacugacagaaauuaucau

SEQ ID NO: 22203 - RNA, 20 nt, Artificial Sequence
  targeting sequence with TTCN PAM
ccagcuugucuaagaguuug

SEQ ID NO: 22204 - RNA, 20 nt, Artificial Sequence
  targeting sequence with TTCN PAM
augucuuaucguccuccaau

SEQ ID NO: 22205 - RNA, 20 nt, Artificial Sequence
  targeting sequence with TTCN PAM
agaaaacaagcaaaaggaaa

SEQ ID NO: 22206 - RNA, 20 nt, Artificial Sequence
  targeting sequence with TTCN PAM
agaaagagcagcauauugga

SEQ ID NO: 22207 - RNA, 20 nt, Artificial Sequence
  targeting sequence with TTCN PAM
uuuugcuuguuuucuagaaa

SEQ ID NO: 22208 - RNA, 20 nt, Artificial Sequence
  targeting sequence with TTCN PAM
cuugucuacagcucgaguau

SEQ ID NO: 22209 - RNA, 20 nt, Artificial Sequence
  targeting sequence with TTCN PAM
cugacacagaaggaagaagc

SEQ ID NO: 22210 - RNA, 20 nt, Artificial Sequence
  targeting sequence with TTCN PAM
gugucagggaacauucgcuu

SEQ ID NO: 22211 - RNA, 20 nt, Artificial Sequence
  targeting sequence with TTCN PAM
uucugugucagggaacauuc

SEQ ID NO: 22212 - RNA, 20 nt, Artificial Sequence
  targeting sequence with TTCN PAM
uccuucugugucagggaaca

SEQ ID NO: 22213 - RNA, 20 nt, Artificial Sequence
  targeting sequence with TTCN PAM
aaagacuacauugugugaua

SEQ ID NO: 22214 - RNA, 20 nt, Artificial Sequence
  targeting sequence with TTCN PAM
uuguaucacacaauguaguc

SEQ ID NO: 22215 - RNA, 20 nt, Artificial Sequence
  targeting sequence with TTCN PAM
gucugacuccagauauuccu

SEQ ID NO: 22216 - RNA, 20 nt, Artificial Sequence
  targeting sequence with TTCN PAM
agcucugucugacccugacc

SEQ ID NO: 22217 - RNA, 20 nt, Artificial Sequence
  targeting sequence with TTCN PAM
ucuucuugagucucagcguc

SEQ ID NO: 22218 - RNA, 20 nt, Artificial Sequence
  targeting sequence with TTCN PAM
ugagucucagcguccuucac

SEQ ID NO: 22219 - RNA, 20 nt, Artificial Sequence
  targeting sequence with TTCN PAM
cucuaacacuuggguaguga

SEQ ID NO: 22220 - RNA, 20 nt, Artificial Sequence
  targeting sequence with TTCN PAM
ucucagugacccucagggua

SEQ ID NO: 22221 - RNA, 20 nt, Artificial Sequence
  targeting sequence with TTCN PAM
ggguauauacuuuauacaca

SEQ ID NO: 22222 - RNA, 20 nt, Artificial Sequence
  targeting sequence with TTCN PAM
gcaugcgggauuucuuaccu

SEQ ID NO: 22223 - RNA, 20 nt, Artificial Sequence
  targeting sequence with TTCN PAM
uaccuucucuuuagaaguag

SEQ ID NO: 22224 - RNA, 20 nt, Artificial Sequence
  targeting sequence with TTCN PAM
cuuuagaaguagggauaucg

SEQ ID NO: 22225 - RNA, 20 nt, Artificial Sequence
  targeting sequence with TTCN PAM
aaagagaagguaagaaaucc

SEQ ID NO: 22226 - RNA, 20 nt, Artificial Sequence
  targeting sequence with TTCN PAM
gcccaagagggagaccaaua

SEQ ID NO: 22227 - RNA, 20 nt, Artificial Sequence
  targeting sequence with TTCN PAM
ccugcucugucauccccaug

SEQ ID NO: 22228 - RNA, 20 nt, Artificial Sequence
  targeting sequence with TTCN PAM
aacuauuccgucauagccuu

SEQ ID NO: 22229 - RNA, 20 nt, Artificial Sequence
  targeting sequence with TTCN PAM
gucauagccuuggaauacac

SEQ ID NO: 22230 - RNA, 20 nt, Artificial Sequence
  targeting sequence with TTCN PAM
aaggcuaugacggaauaguu

SEQ ID NO: 22231 - RNA, 20 nt, Artificial Sequence
  targeting sequence with TTCN PAM
uguguauuccaaggcuauga

SEQ ID NO: 22232 - RNA, 20 nt, Artificial Sequence
  targeting sequence with TTCN PAM
ucaggguugcuuuccugugu

SEQ ID NO: 22233 - RNA, 20 nt, Artificial Sequence
  targeting sequence with TTCN PAM
auuaaacaaacaaagguuug

SEQ ID NO: 22234 - RNA, 20 nt, Artificial Sequence
  targeting sequence with TTCN PAM
cagcgggaaccuaggggaga

SEQ ID NO: 22235 - RNA, 20 nt, Artificial Sequence
  targeting sequence with TTCN PAM
cgcugggaaggcuugacaac

SEQ ID NO: 22236 - RNA, 20 nt, Artificial Sequence
  targeting sequence with TTCN PAM
aguaggaaggcccaggggcc

SEQ ID NO: 22237 - RNA, 20 nt, Artificial Sequence
  targeting sequence with TTCN PAM
uacuggaaccugggcuuggc

SEQ ID NO: 22238 - RNA, 20 nt, Artificial Sequence
  targeting sequence with TTCN PAM
agugaggccccugggccuuc

SEQ ID NO: 22239 - RNA, 20 nt, Artificial Sequence
  targeting sequence with TTCN PAM
ugcccauggcugcagaggcc

SEQ ID NO: 22240 - RNA, 20 nt, Artificial Sequence
  targeting sequence with TTCN PAM
uuugcuucuaauuuuuccag

SEQ ID NO: 22241 - RNA, 20 nt, Artificial Sequence
  targeting sequence with TTCN PAM
aauuuuuccaggagaggaag

SEQ ID NO: 22242 - RNA, 20 nt, Artificial Sequence
  targeting sequence with TTCN PAM
aggagaggaagaagcgggga

SEQ ID NO: 22243 - RNA, 20 nt, Artificial Sequence
  targeting sequence with TTCN PAM
ucuccuggaaaaauuagaag

SEQ ID NO: 22244 - RNA, 20 nt, Artificial Sequence
  targeting sequence with TTCN PAM
uccucuccuggaaaaauuag

SEQ ID NO: 22245 - RNA, 20 nt, Artificial Sequence
  targeting sequence with TTCN PAM
ggcagauguguuuuccuacc

SEQ ID NO: 22246 - RNA, 20 nt, Artificial Sequence
  targeting sequence with TTCN PAM
uaccaggggaaguuccauga

SEQ ID NO: 22247 - RNA, 20 nt, Artificial Sequence
  targeting sequence with TTCN PAM
ccugguaggaaaacacaucu

SEQ ID NO: 22248 - RNA, 20 nt, Artificial Sequence
  targeting sequence with TTCN PAM
augaggccgccaaacuguac

SEQ ID NO: 22249 - RNA, 20 nt, Artificial Sequence
  targeting sequence with TTCN PAM
cgugcccacuccucuuguac

SEQ ID NO: 22250 - RNA, 20 nt, Artificial Sequence
  targeting sequence with TTCN PAM
agcgcgagguucucgugccc

SEQ ID NO: 22251 - RNA, 20 nt, Artificial Sequence
  targeting sequence with TTCN PAM
cacgugcgguguccaaguua

SEQ ID NO: 22252 - RNA, 20 nt, Artificial Sequence
  targeting sequence with TTCN PAM
ccaagagugcugcggacaaa

SEQ ID NO: 22253 - RNA, 20 nt, Artificial Sequence
  targeting sequence with TTCN PAM
gagaccauugcuaguuuuug

SEQ ID NO: 22254 - RNA, 20 nt, Artificial Sequence
  targeting sequence with TTCN PAM
ccacauccuuucugagacca

SEQ ID NO: 22255 - RNA, 20 nt, Artificial Sequence
  targeting sequence with TTCN PAM
accaguggcuguagaugggu

SEQ ID NO: 22256 - RNA, 20 nt, Artificial Sequence
  targeting sequence with TTCN PAM
gaccuucaucagugacaggg

SEQ ID NO: 22257 - RNA, 20 nt, Artificial Sequence
  targeting sequence with TTCN PAM
ucagugacagggcuggaugg

SEQ ID NO: 22258 - RNA, 20 nt, Artificial Sequence
  targeting sequence with TTCN PAM
uugaguugagggcucagggc

SEQ ID NO: 22259 - RNA, 20 nt, Artificial Sequence
  targeting sequence with TTCN PAM
gggcugucccccacaaaucc

SEQ ID NO: 22260 - RNA, 20 nt, Artificial Sequence
  targeting sequence with TTCN PAM
uggcggcuccugacaaggau

SEQ ID NO: 22261 - RNA, 20 nt, Artificial Sequence
  targeting sequence with TTCN PAM
ggcaggagccgguccugccg

SEQ ID NO: 22262 - RNA, 20 nt, Artificial Sequence
  targeting sequence with TTCN PAM
cauagcaccugcugauuguc

SEQ ID NO: 22263 - RNA, 20 nt, Artificial Sequence
  targeting sequence with TTCN PAM
cacugggcuucugggaaguc

SEQ ID NO: 22264 - RNA, 20 nt, Artificial Sequence
  targeting sequence with TTCN PAM
gggaagucaggcagagccuc

SEQ ID NO: 22265 - RNA, 20 nt, Artificial Sequence
  targeting sequence with TTCN PAM
cagaagcccagugagaaguc

SEQ ID NO: 22266 - RNA, 20 nt, Artificial Sequence
  targeting sequence with TTCN PAM
cuuuugcauugggacggccc

SEQ ID NO: 22267 - RNA, 20 nt, Artificial Sequence
  targeting sequence with TTCN PAM
ugggggccgucccaaugcaa

SEQ ID NO: 22268 - RNA, 20 nt, Artificial Sequence
  targeting sequence with TTCN PAM
uggaccaggcuccugauggc

SEQ ID NO: 22269 - RNA, 20 nt, Artificial Sequence
  targeting sequence with TTCN PAM
gugggaaggaguugcacuaa

SEQ ID NO: 22270 - RNA, 20 nt, Artificial Sequence
  targeting sequence with TTCN PAM
cacagaagccaucaggagcc

SEQ ID NO: 22271 - RNA, 20 nt, Artificial Sequence
  targeting sequence with TTCN PAM
gucuaagcaagguucaaaga

SEQ ID NO: 22272 - RNA, 20 nt, Artificial Sequence
  targeting sequence with TTCN PAM
aagaggcuucgguacacugg

SEQ ID NO: 22273 - RNA, 20 nt, Artificial Sequence
  targeting sequence with TTCN PAM
guacacugggcaaugagggu

SEQ ID NO: 22274 - RNA, 20 nt, Artificial Sequence
  targeting sequence with TTCN PAM
uuccaucaaggggcuuuguu

SEQ ID NO: 22275 - RNA, 20 nt, Artificial Sequence
  targeting sequence with TTCN PAM
aucaaggggcuuuguuaacc

SEQ ID NO: 22276 - RNA, 20 nt, Artificial Sequence
  targeting sequence with TTCN PAM
ggaagugucaaaaguggcuc

SEQ ID NO: 22277 - RNA, 20 nt, Artificial Sequence
  targeting sequence with TTCN PAM
agaaaaggcagguuaacaaa

SEQ ID NO: 22278 - RNA, 20 nt, Artificial Sequence
  targeting sequence with TTCN PAM
uaacauacugagagccacuu

SEQ ID NO: 22279 - RNA, 20 nt, Artificial Sequence
  targeting sequence with TTCN PAM
ccagcucacaaguucaagau

SEQ ID NO: 22280 - RNA, 20 nt, Artificial Sequence
  targeting sequence with TTCN PAM
agauggaaaaucuuccccac

SEQ ID NO: 22281 - RNA, 20 nt, Artificial Sequence
  targeting sequence with TTCN PAM
aucuugaacuugugagcugg

SEQ ID NO: 22282 - RNA, 20 nt, Artificial Sequence
  targeting sequence with TTCN PAM
ccacuuuuuucugcuuuucu

SEQ ID NO: 22283 - RNA, 20 nt, Artificial Sequence
  targeting sequence with TTCN PAM
gcuuuucuauuccugaagau

SEQ ID NO: 22284 - RNA, 20 nt, Artificial Sequence
  targeting sequence with TTCN PAM
auuccugaagauggcugugc

SEQ ID NO: 22285 - RNA, 20 nt, Artificial Sequence
  targeting sequence with TTCN PAM
ugaagauggcugugcucuuc

SEQ ID NO: 22286 - RNA, 20 nt, Artificial Sequence
  targeting sequence with TTCN PAM
ggaauagaaaagcagaaaaa

SEQ ID NO: 22287 - RNA, 20 nt, Artificial Sequence
  targeting sequence with TTCN PAM
accaccuguucgacccuggg

SEQ ID NO: 22288 - RNA, 20 nt, Artificial Sequence
  targeting sequence with TTCN PAM
acccuggggcugaaggugug

SEQ ID NO: 22289 - RNA, 20 nt, Artificial Sequence
  targeting sequence with TTCN PAM
gccccagggucgaacaggug

SEQ ID NO: 22290 - RNA, 20 nt, Artificial Sequence
  targeting sequence with TTCN PAM
ucaggacuuggacgagcucc

SEQ ID NO: 22291 - RNA, 20 nt, Artificial Sequence
  targeting sequence with TTCN PAM
ccuuagugauuucuucacuc

SEQ ID NO: 22292 - RNA, 20 nt, Artificial Sequence
  targeting sequence with TTCN PAM
ucacuccguaccugagaccc

SEQ ID NO: 22293 - RNA, 20 nt, Artificial Sequence
  targeting sequence with TTCN PAM
cuccguaccugagacccagg

SEQ ID NO: 22294 - RNA, 20 nt, Artificial Sequence
  targeting sequence with TTCN PAM
ggcucccucuacuuuuuccu

SEQ ID NO: 22295 - RNA, 20 nt, Artificial Sequence
  targeting sequence with TTCN PAM
ucgucaccuuuccuacccuc

SEQ ID NO: 22296 - RNA, 20 nt, Artificial Sequence
  targeting sequence with TTCN PAM
uacccucccucaggccccac

SEQ ID NO: 22297 - RNA, 20 nt, Artificial Sequence
  targeting sequence with TTCN PAM
aggugucuuugguggggccu

SEQ ID NO: 22298 - RNA, 20 nt, Artificial Sequence
  targeting sequence with TTCN PAM
uaacacauucauacugagau

SEQ ID NO: 22299 - RNA, 20 nt, Artificial Sequence
  targeting sequence with TTCN PAM
uacugagaucaccagaguca

SEQ ID NO: 22300 - RNA, 20 nt, Artificial Sequence
  targeting sequence with TTCN PAM
ggggauaacaaaauuuuaac

SEQ ID NO: 22301 - RNA, 20 nt, Artificial Sequence
  targeting sequence with TTCN PAM
uccugaguuaaaauuuuguu

SEQ ID NO: 22302 - RNA, 20 nt, Artificial Sequence
  targeting sequence with TTCN PAM
accucuagggucuugauccc

SEQ ID NO: 22303 - RNA, 20 nt, Artificial Sequence
  targeting sequence with TTCN PAM
caacccuaaauucuaccucu

SEQ ID NO: 22304 - RNA, 20 nt, Artificial Sequence
  targeting sequence with TTCN PAM
acugcagcacagcugccucc

SEQ ID NO: 22305 - RNA, 20 nt, Artificial Sequence
  targeting sequence with TTCN PAM
gccucccaaagugcuaguau

SEQ ID NO: 22306 - RNA, 20 nt, Artificial Sequence
  targeting sequence with TTCN PAM
ccauauugcccaggcugguc

SEQ ID NO: 22307 - RNA, 20 nt, Artificial Sequence
  targeting sequence with TTCN PAM
accuuagccucccaguagcu

SEQ ID NO: 22308 - RNA, 20 nt, Artificial Sequence
  targeting sequence with TTCN PAM
accucuggggcucaagcaau

SEQ ID NO: 22309 - RNA, 20 nt, Artificial Sequence
  targeting sequence with TTCN PAM
agccugggugacagagcaag

SEQ ID NO: 22310 - RNA, 20 nt, Artificial Sequence
  targeting sequence with TTCN PAM
uucugugggaugaccugggg

SEQ ID NO: 22311 - RNA, 20 nt, Artificial Sequence
  targeting sequence with TTCN PAM
gugggaugaccuggggaaag

SEQ ID NO: 22312 - RNA, 20 nt, Artificial Sequence
  targeting sequence with TTCN PAM
ccaggucaucccacagaaag

SEQ ID NO: 22313 - RNA, 20 nt, Artificial Sequence
  targeting sequence with TTCN PAM
guuugccaaaccucccuucc

SEQ ID NO: 22314 - RNA, 20 nt, Artificial Sequence
  targeting sequence with TTCN PAM
cuucucagaugguaauagcg

SEQ ID NO: 22315 - RNA, 20 nt, Artificial Sequence
  targeting sequence with TTCN PAM
cagaugguaauagcgacagc

SEQ ID NO: 22316 - RNA, 20 nt, Artificial Sequence
  targeting sequence with TTCN PAM
gugcaaaucucaugacuaaa

SEQ ID NO: 22317 - RNA, 20 nt, Artificial Sequence
  targeting sequence with TTCN PAM
uauacauuauucugugcaaa

SEQ ID NO: 22318 - RNA, 20 nt, Artificial Sequence
  targeting sequence with TTCN PAM
aaugcgcuuuccuauacauu

SEQ ID NO: 22319 - RNA, 20 nt, Artificial Sequence
  targeting sequence with TTCN PAM
acagguuggcauuucuaaug

SEQ ID NO: 22320 - RNA, 20 nt, Artificial Sequence
  targeting sequence with TTCN PAM
uaaucuuucuacagguuggc

SEQ ID NO: 22321 - RNA, 20 nt, Artificial Sequence
  targeting sequence with TTCN PAM
uaccucucucccuggcuggc

SEQ ID NO: 22322 - RNA, 20 nt, Artificial Sequence
  targeting sequence with TTCN PAM
ugugcccacagccucccacc

SEQ ID NO: 22323 - RNA, 20 nt, Artificial Sequence
  targeting sequence with TTCN PAM
ggugggaggcugugggcaca

SEQ ID NO: 22324 - RNA, 20 nt, Artificial Sequence
  targeting sequence with TTCN PAM
uagagagacggagcaaaugg

SEQ ID NO: 22325 - RNA, 20 nt, Artificial Sequence
  targeting sequence with TTCN PAM
aaggagguugguuccuuuuc

SEQ ID NO: 22326 - RNA, 20 nt, Artificial Sequence
  targeting sequence with TTCN PAM
uuuucaauccccccugcccc

SEQ ID NO: 22327 - RNA, 20 nt, Artificial Sequence
  targeting sequence with TTCN PAM
auccccccugcccccaccug

SEQ ID NO: 22328 - RNA, 20 nt, Artificial Sequence
  targeting sequence with TTCN PAM
gacuaccaggugggggcagg

SEQ ID NO: 22329 - RNA, 20 nt, Artificial Sequence
  targeting sequence with TTCN PAM
caaauucagacuaccaggug

SEQ ID NO: 22330 - RNA, 20 nt, Artificial Sequence
  targeting sequence with TTCN PAM
aguaaacaaaaauaugccac

SEQ ID NO: 22331 - RNA, 20 nt, Artificial Sequence
  targeting sequence with TTCN PAM
caagauucaaucugguuuuc

SEQ ID NO: 22332 - RNA, 20 nt, Artificial Sequence
  targeting sequence with TTCN PAM
aucugguuuucagaaaauuu

SEQ ID NO: 22333 - RNA, 20 nt, Artificial Sequence
  targeting sequence with TTCN PAM
gaaaauuuuaaaauuacauu

SEQ ID NO: 22334 - RNA, 20 nt, Artificial Sequence
  targeting sequence with TTCN PAM
gaaaaccagauugaaucuug

SEQ ID NO: 22335 - RNA, 20 nt, Artificial Sequence
  targeting sequence with TTCN PAM
cacguacaaauaaauuguau

SEQ ID NO: 22336 - RNA, 20 nt, Artificial Sequence
  targeting sequence with TTCN PAM
ggauaagugacauguuuaua

SEQ ID NO: 22337 - RNA, 20 nt, Artificial Sequence
  targeting sequence with TTCN PAM
cuuuaucaccauauaaacau

SEQ ID NO: 22338 - RNA, 20 nt, Artificial Sequence
  targeting sequence with TTCN PAM
uaucaaaaucaccaagcaug

SEQ ID NO: 22339 - RNA, 20 nt, Artificial Sequence
  targeting sequence with TTCN PAM
caugcuuggugauuuugaua

SEQ ID NO: 22340 - RNA, 20 nt, Artificial Sequence
  targeting sequence with TTCN PAM
ucacucagcacagccucuuu

SEQ ID NO: 22341 - RNA, 20 nt, Artificial Sequence
  targeting sequence with TTCN PAM
guccacuucagggccaaguc

SEQ ID NO: 22342 - RNA, 20 nt, Artificial Sequence
  targeting sequence with TTCN PAM
gggccaagucuuugccaugg

SEQ ID NO: 22343 - RNA, 20 nt, Artificial Sequence
  targeting sequence with TTCN PAM
ggaaagcaaaaagccuuuga

SEQ ID NO: 22344 - RNA, 20 nt, Artificial Sequence
  targeting sequence with TTCN PAM
ugaagcuaaguuacacauua

SEQ ID NO: 22345 - RNA, 20 nt, Artificial Sequence
  targeting sequence with TTCN PAM
aaggcuuuuugcuuuccuga

SEQ ID NO: 22346 - RNA, 20 nt, Artificial Sequence
  targeting sequence with TTCN PAM
aguuugcugagccuugaagg

SEQ ID NO: 22347 - RNA, 20 nt, Artificial Sequence
  targeting sequence with TTCN PAM
aggcucagcaaacuggaaau

SEQ ID NO: 22348 - RNA, 20 nt, Artificial Sequence
  targeting sequence with TTCN PAM
uucaaggcucagcaaacugg

SEQ ID NO: 22349 - RNA, 20 nt, Artificial Sequence
  targeting sequence with TTCN PAM
augaagucacagcucccuga

SEQ ID NO: 22350 - RNA, 20 nt, Artificial Sequence
  targeting sequence with TTCN PAM
uugaagcugggucuaaaagc

SEQ ID NO: 22351 - RNA, 20 nt, Artificial Sequence
  targeting sequence with TTCN PAM
gugagugcucaggggaccag

SEQ ID NO: 22352 - RNA, 20 nt, Artificial Sequence
  targeting sequence with TTCN PAM
aagggacuucagugagugcu

SEQ ID NO: 22353 - RNA, 20 nt, Artificial Sequence
  targeting sequence with TTCN PAM
agucuccuaagaugccuguu

SEQ ID NO: 22354 - RNA, 20 nt, Artificial Sequence
  targeting sequence with TTCN PAM
uccagcugccacccucauuu

SEQ ID NO: 22355 - RNA, 20 nt, Artificial Sequence
  targeting sequence with TTCN PAM
ccagccagguaggcaggguu

SEQ ID NO: 22356 - RNA, 20 nt, Artificial Sequence
  targeting sequence with TTCN PAM
agcuucgugcuggcauagag

SEQ ID NO: 22357 - RNA, 20 nt, Artificial Sequence
  targeting sequence with TTCN PAM
ugcuggcauagagaauccgc

SEQ ID NO: 22358 - RNA, 20 nt, Artificial Sequence
  targeting sequence with TTCN PAM
cuaugccagcacgaagcugg

SEQ ID NO: 22359 - RNA, 20 nt, Artificial Sequence
  targeting sequence with TTCN PAM
ggcagcugcuauggcgcgga

SEQ ID NO: 22360 - RNA, 20 nt, Artificial Sequence
  targeting sequence with TTCN PAM
uucuggcagcugcuauggcg

SEQ ID NO: 22361 - RNA, 20 nt, Artificial Sequence
  targeting sequence with TTCN PAM
aagccccuucccuuugucag

SEQ ID NO: 22362 - RNA, 20 nt, Artificial Sequence
  targeting sequence with TTCN PAM
cuuugucagcuccagggaga

SEQ ID NO: 22363 - RNA, 20 nt, Artificial Sequence
  targeting sequence with TTCN PAM
cccuggagcugacaaaggga

SEQ ID NO: 22364 - RNA, 20 nt, Artificial Sequence
  targeting sequence with TTCN PAM
auugggucccagcaucaggg

SEQ ID NO: 22365 - RNA, 20 nt, Artificial Sequence
  targeting sequence with TTCN PAM
uccccuucuuaaaauguauc

SEQ ID NO: 22366 - RNA, 20 nt, Artificial Sequence
  targeting sequence with TTCN PAM
uaaaauguaucauauauuag

SEQ ID NO: 22367 - RNA, 20 nt, Artificial Sequence
  targeting sequence with TTCN PAM
gaguauuaggucggccuaau

SEQ ID NO: 22368 - RNA, 20 nt, Artificial Sequence
  targeting sequence with TTCN PAM
ggguaaaugugcuuucagag

SEQ ID NO: 22369 - RNA, 20 nt, Artificial Sequence
  targeting sequence with TTCN PAM
cucauuugcuuucaggguaa

SEQ ID NO: 22370 - RNA, 20 nt, Artificial Sequence
  targeting sequence with TTCN PAM
aguggauuuuuagcauacau

SEQ ID NO: 22371 - RNA, 20 nt, Artificial Sequence
  targeting sequence with TTCN PAM
gacacaugaguguuaaucau

SEQ ID NO: 22372 - RNA, 20 nt, Artificial Sequence
  targeting sequence with TTCN PAM
ccaugauuaacacucaugug

SEQ ID NO: 22373 - RNA, 20 nt, Artificial Sequence
  targeting sequence with TTCN PAM
cagugaggcugacacaaagu

SEQ ID NO: 22374 - RNA, 20 nt, Artificial Sequence
  targeting sequence with TTCN PAM
ugagacaaaccacuucuuac

SEQ ID NO: 22375 - RNA, 20 nt, Artificial Sequence
  targeting sequence with TTCN PAM
uaccaguaacauagaccugg

SEQ ID NO: 22376 - RNA, 20 nt, Artificial Sequence
  targeting sequence with TTCN PAM
cuuuuugaaaagcuccaccu

SEQ ID NO: 22377 - RNA, 20 nt, Artificial Sequence
  targeting sequence with TTCN PAM
aaaagggaaacugggagcac

SEQ ID NO: 22378 - RNA, 20 nt, Artificial Sequence
  targeting sequence with TTCN PAM
ggcaaacucccacgugugua

SEQ ID NO: 22379 - RNA, 20 nt, Artificial Sequence
  targeting sequence with TTCN PAM
gaguaguuacccaaaauaca

SEQ ID NO: 22380 - RNA, 20 nt, Artificial Sequence
  targeting sequence with TTCN PAM
gaggcuguuucucacacauu

SEQ ID NO: 22381 - RNA, 20 nt, Artificial Sequence
  targeting sequence with TTCN PAM
cacacauuguagggccagcc

SEQ ID NO: 22382 - RNA, 20 nt, Artificial Sequence
  targeting sequence with TTCN PAM
cugggcuggcccuacaaugu

SEQ ID NO: 22383 - RNA, 20 nt, Artificial Sequence
  targeting sequence with TTCN PAM
gagguaugcugaggccgaag

SEQ ID NO: 22384 - RNA, 20 nt, Artificial Sequence
  targeting sequence with TTCN PAM
gccucagcauaccucugaag

SEQ ID NO: 22385 - RNA, 20 nt, Artificial Sequence
  targeting sequence with TTCN PAM
uucggccucagcauaccucu

SEQ ID NO: 22386 - RNA, 20 nt, Artificial Sequence
  targeting sequence with TTCN PAM
uucucagguccucuccugag

SEQ ID NO: 22387 - RNA, 20 nt, Artificial Sequence
  targeting sequence with TTCN PAM
cagguccucuccugagcacc

SEQ ID NO: 22388 - RNA, 20 nt, Artificial Sequence
  targeting sequence with TTCN PAM
cugccucagauucccccaug

SEQ ID NO: 22389 - RNA, 20 nt, Artificial Sequence
  targeting sequence with TTCN PAM
cccauggccuccugcugucc

SEQ ID NO: 22390 - RNA, 20 nt, Artificial Sequence
  targeting sequence with TTCN PAM
caccccugcagaccugaccu

SEQ ID NO: 22391 - RNA, 20 nt, Artificial Sequence
  targeting sequence with TTCN PAM
gcugagaagcaacuaaccag

SEQ ID NO: 22392 - RNA, 20 nt, Artificial Sequence
  targeting sequence with TTCN PAM
cagcugaaugguuagggauc

SEQ ID NO: 22393 - RNA, 20 nt, Artificial Sequence
  targeting sequence with TTCN PAM
aggaaaguaacuggggcaaa

SEQ ID NO: 22394 - RNA, 20 nt, Artificial Sequence
  targeting sequence with TTCN PAM
uggaacagauaacaagcaaa

SEQ ID NO: 22395 - RNA, 20 nt, Artificial Sequence
  targeting sequence with TTCN PAM
cuaguucagggcacagaaug

SEQ ID NO: 22396 - RNA, 20 nt, Artificial Sequence
  targeting sequence with TTCN PAM
gggcacagaauguuugcugg

SEQ ID NO: 22397 - RNA, 20 nt, Artificial Sequence
  targeting sequence with TTCN PAM
gugcccugaacuagagaauc

SEQ ID NO: 22398 - RNA, 20 nt, Artificial Sequence
  targeting sequence with TTCN PAM
ccuaaacuuacacaaacaaa

SEQ ID NO: 22399 - RNA, 20 nt, Artificial Sequence
  targeting sequence with TTCN PAM
gagugaggcugagcaugggu

SEQ ID NO: 22400 - RNA, 20 nt, Artificial Sequence
  targeting sequence with TTCN PAM
gaucauaugggugauaccac

SEQ ID NO: 22401 - RNA, 20 nt, Artificial Sequence
  targeting sequence with TTCN PAM
acauaucgagaccugucauc

SEQ ID NO: 22402 - RNA, 20 nt, Artificial Sequence
  targeting sequence with TTCN PAM
uaaacagcaaugagacaacc

SEQ ID NO: 22403 - RNA, 20 nt, Artificial Sequence
  targeting sequence with TTCN PAM
ugaucaggcugucucucucu

SEQ ID NO: 22404 - RNA, 20 nt, Artificial Sequence
  targeting sequence with TTCN PAM
ugugcagugccccaaauagu

SEQ ID NO: 22405 - RNA, 20 nt, Artificial Sequence
  targeting sequence with TTCN PAM
agacuauuuggggcacugca

SEQ ID NO: 22406 - RNA, 20 nt, Artificial Sequence
  targeting sequence with TTCN PAM
ucggcuaaacaacacuuucu

SEQ ID NO: 22407 - RNA, 20 nt, Artificial Sequence
  targeting sequence with TTCN PAM
cgucucacaaaugggcauuu

SEQ ID NO: 22408 - RNA, 20 nt, Artificial Sequence
  targeting sequence with TTCN PAM
uucccgucucacaaaugggc

SEQ ID NO: 22409 - RNA, 20 nt, Artificial Sequence
  targeting sequence with TTCN PAM
ugggggauccugggacagca

SEQ ID NO: 22410 - RNA, 20 nt, Artificial Sequence
  targeting sequence with TTCN PAM
cgagaccugggacuccccca

SEQ ID NO: 22411 - RNA, 20 nt, Artificial Sequence
  targeting sequence with TTCN PAM
gccauguggagcccgcccuu

SEQ ID NO: 22412 - RNA, 20 nt, Artificial Sequence
  targeting sequence with TTCN PAM
agcagcaagggcgggcucca

SEQ ID NO: 22413 - RNA, 20 nt, Artificial Sequence
  targeting sequence with TTCN PAM
ugugccagcguuacaucagg

SEQ ID NO: 22414 - RNA, 20 nt, Artificial Sequence
  targeting sequence with TTCN PAM
gauccagaguguuuuuguuu

SEQ ID NO: 22415 - RNA, 20 nt, Artificial Sequence
  targeting sequence with TTCN PAM
ucaggauuuccuuggaucug

SEQ ID NO: 22416 - RNA, 20 nt, Artificial Sequence
  targeting sequence with TTCN PAM
uuggaucuggagaccccaaa

SEQ ID NO: 22417 - RNA, 20 nt, Artificial Sequence
  targeting sequence with TTCN PAM
uuggggucuccagauccaag

SEQ ID NO: 22418 - RNA, 20 nt, Artificial Sequence
  targeting sequence with TTCN PAM
ggcccagucagccuguuugg

SEQ ID NO: 22419 - RNA, 20 nt, Artificial Sequence
  targeting sequence with TTCN PAM
cggggcagggaccaaaaccu

SEQ ID NO: 22420 - RNA, 20 nt, Artificial Sequence
  targeting sequence with TTCN PAM
cuugucagucaagaggugac

SEQ ID NO: 22421 - RNA, 20 nt, Artificial Sequence
  targeting sequence with TTCN PAM
aauuaucuaaagcuaaugug

SEQ ID NO: 22422 - RNA, 20 nt, Artificial Sequence
  targeting sequence with TTCN PAM
ucaggagacacagagauugc

SEQ ID NO: 22423 - RNA, 20 nt, Artificial Sequence
  targeting sequence with TTCN PAM
ggagacacagagauugcaca

SEQ ID NO: 22424 - RNA, 20 nt, Artificial Sequence
  targeting sequence with TTCN PAM
aggagcuuguggagucacua

SEQ ID NO: 22425 - RNA, 20 nt, Artificial Sequence
  targeting sequence with TTCN PAM
ccuagugacuccacaagcuc

SEQ ID NO: 22426 - RNA, 20 nt, Artificial Sequence
  targeting sequence with TTCN PAM
cugguccccaccaucccuuc

SEQ ID NO: 22427 - RNA, 20 nt, Artificial Sequence
  targeting sequence with TTCN PAM
aggcauuagguuuuccaccu

SEQ ID NO: 22428 - RNA, 20 nt, Artificial Sequence
  targeting sequence with TTCN PAM
accuaugccaucagggcugg

SEQ ID NO: 22429 - RNA, 20 nt, Artificial Sequence
  targeting sequence with TTCN PAM
ucaucugcaaggugggcgag

SEQ ID NO: 22430 - RNA, 20 nt, Artificial Sequence
  targeting sequence with TTCN PAM
guuucaucaucugcaaggug

SEQ ID NO: 22431 - RNA, 20 nt, Artificial Sequence
  targeting sequence with TTCN PAM
caaaguccagauagcuggaa

SEQ ID NO: 22432 - RNA, 20 nt, Artificial Sequence
  targeting sequence with TTCN PAM
agcuaucuggacuuugggaa

SEQ ID NO: 22433 - RNA, 20 nt, Artificial Sequence
  targeting sequence with TTCN PAM
uaccauuacacgcguaguug

SEQ ID NO: 22434 - RNA, 20 nt, Artificial Sequence
  targeting sequence with TTCN PAM
aaauccaucagggaagaauu

SEQ ID NO: 22435 - RNA, 20 nt, Artificial Sequence
  targeting sequence with TTCN PAM
cugauggauuuggaacuugu

SEQ ID NO: 22436 - RNA, 20 nt, Artificial Sequence
  targeting sequence with TTCN PAM
ucccugauggauuuggaacu

SEQ ID NO: 22437 - RNA, 20 nt, Artificial Sequence
  targeting sequence with TTCN PAM
uaugggaggaaccauggaua

SEQ ID NO: 22438 - RNA, 20 nt, Artificial Sequence
  targeting sequence with TTCN PAM
ucccauaagaauucuucccu

SEQ ID NO: 22439 - RNA, 20 nt, Artificial Sequence
  targeting sequence with TTCN PAM
cuuaggagacacucuuucca

SEQ ID NO: 22440 - RNA, 20 nt, Artificial Sequence
  targeting sequence with TTCN PAM
augaagggaccuuaaagaau

SEQ ID NO: 22441 - RNA, 20 nt, Artificial Sequence
  targeting sequence with TTCN PAM
uggaaagagugucuccuaag

SEQ ID NO: 22442 - RNA, 20 nt, Artificial Sequence
  targeting sequence with TTCN PAM
uuaaggucccuucauggaaa

SEQ ID NO: 22443 - RNA, 20 nt, Artificial Sequence
  targeting sequence with TTCN PAM
aagagguaaauagagauggc

SEQ ID NO: 22444 - RNA, 20 nt, Artificial Sequence
  targeting sequence with TTCN PAM
cgccaucucuauuuaccucu

SEQ ID NO: 22445 - RNA, 20 nt, Artificial Sequence
  targeting sequence with TTCN PAM
ugccugcauauccuuucccg

SEQ ID NO: 22446 - RNA, 20 nt, Artificial Sequence
  targeting sequence with TTCN PAM
gcuguacuuccugccugcau

SEQ ID NO: 22447 - RNA, 20 nt, Artificial Sequence
  targeting sequence with TTCN PAM
aaccagagccaacucgcugu

SEQ ID NO: 22448 - RNA, 20 nt, Artificial Sequence
  targeting sequence with TTCN PAM
cacacgucuuuuauuccaac

SEQ ID NO: 22449 - RNA, 20 nt, Artificial Sequence
  targeting sequence with TTCN PAM
cccucccauucccacacguc

SEQ ID NO: 22450 - RNA, 20 nt, Artificial Sequence
  targeting sequence with TTCN PAM
cccaacccacagcccauguc

SEQ ID NO: 22451 - RNA, 20 nt, Artificial Sequence
  targeting sequence with TTCN PAM
aguguggccagcccacuucc

SEQ ID NO: 22452 - RNA, 20 nt, Artificial Sequence
  targeting sequence with TTCN PAM
accugccugccugagggggu

SEQ ID NO: 22453 - RNA, 20 nt, Artificial Sequence
  targeting sequence with TTCN PAM
cuccugcucuacugcacuag

SEQ ID NO: 22454 - RNA, 20 nt, Artificial Sequence
  targeting sequence with TTCN PAM
cucucaugcccucagcuacc

SEQ ID NO: 22455 - RNA, 20 nt, Artificial Sequence
  targeting sequence with TTCN PAM
aacacugcuacuucucucuc

SEQ ID NO: 22456 - RNA, 20 nt, Artificial Sequence
  targeting sequence with TTCN PAM
ucaagguggacaacagggag

SEQ ID NO: 22457 - RNA, 20 nt, Artificial Sequence
  targeting sequence with TTCN PAM
gccuugggacucagcacacc

SEQ ID NO: 22458 - RNA, 20 nt, Artificial Sequence
  targeting sequence with TTCN PAM
cccucaagguccggugugcu

SEQ ID NO: 22459 - RNA, 20 nt, Artificial Sequence
  targeting sequence with TTCN PAM
ggcucaagcaugugcacaca

SEQ ID NO: 22460 - RNA, 20 nt, Artificial Sequence
  targeting sequence with TTCN PAM
ucuggaaacaacguuguggu

SEQ ID NO: 22461 - RNA, 20 nt, Artificial Sequence
  targeting sequence with TTCN PAM
ggaaacaacguuguggucua

SEQ ID NO: 22462 - RNA, 20 nt, Artificial Sequence
  targeting sequence with TTCN PAM
agaagaaucaacagccuuua

SEQ ID NO: 22463 - RNA, 20 nt, Artificial Sequence
  targeting sequence with TTCN PAM
auauccccaaauccuggcug

SEQ ID NO: 22464 - RNA, 20 nt, Artificial Sequence
  targeting sequence with TTCN PAM
uugggugcugccauauauua

SEQ ID NO: 22465 - RNA, 20 nt, Artificial Sequence
  targeting sequence with TTCN PAM
uguccgauaguaauuuuuuu

SEQ ID NO: 22466 - RNA, 20 nt, Artificial Sequence
  targeting sequence with TTCN PAM
ccacauuauucuuuaaauga

SEQ ID NO: 22467 - RNA, 20 nt, Artificial Sequence
  targeting sequence with TTCN PAM
uuaaaugaagggguucauau

SEQ ID NO: 22468 - RNA, 20 nt, Artificial Sequence
  targeting sequence with TTCN PAM
uuuaaagaauaaugugggga

SEQ ID NO: 22469 - RNA, 20 nt, Artificial Sequence
  targeting sequence with TTCN PAM
uauagaagagagccaggcag

SEQ ID NO: 22470 - RNA, 20 nt, Artificial Sequence
  targeting sequence with TTCN PAM
auaugaaccccuucauuuaa

SEQ ID NO: 22471 - RNA, 20 nt, Artificial Sequence
  targeting sequence with TTCN PAM
cucuucugguuuuucuuguc

SEQ ID NO: 22472 - RNA, 20 nt, Artificial Sequence
  targeting sequence with TTCN PAM
gguuuuucuugucacuuuca

SEQ ID NO: 22473 - RNA, 20 nt, Artificial Sequence
  targeting sequence with TTCN PAM
ugucacuuucauuuguaagu

SEQ ID NO: 22474 - RNA, 20 nt, Artificial Sequence
  targeting sequence with TTCN PAM
uuuguaagugcuauaguauc

SEQ ID NO: 22475 - RNA, 20 nt, Artificial Sequence
  targeting sequence with TTCN PAM
agaaacacauuaagcauguu

SEQ ID NO: 22476 - RNA, 20 nt, Artificial Sequence
  targeting sequence with TTCN PAM
ugaauuacucaaguacccuc

SEQ ID NO: 22477 - RNA, 20 nt, Artificial Sequence
  targeting sequence with TTCN PAM
gcuugcuuuccagauguggc

SEQ ID NO: 22478 - RNA, 20 nt, Artificial Sequence
  targeting sequence with TTCN PAM
agauguggcuauaaaaggug

SEQ ID NO: 22479 - RNA, 20 nt, Artificial Sequence
  targeting sequence with TTCN PAM
uccagggacguuggguguga

SEQ ID NO: 22480 - RNA, 20 nt, Artificial Sequence
  targeting sequence with TTCN PAM
cacccaucacacccaacguc

SEQ ID NO: 22481 - RNA, 20 nt, Artificial Sequence
  targeting sequence with TTCN PAM
aaggcuguaagggcugucua

SEQ ID NO: 22482 - RNA, 20 nt, Artificial Sequence
  targeting sequence with TTCN PAM
cuaaaaacguguccuuuuuc

SEQ ID NO: 22483 - RNA, 20 nt, Artificial Sequence
  targeting sequence with TTCN PAM
gcugagcaguguuauuuuua

SEQ ID NO: 22484 - RNA, 20 nt, Artificial Sequence
  targeting sequence with TTCN PAM
aaguguagacugacaggccu

SEQ ID NO: 22485 - RNA, 20 nt, Artificial Sequence
  targeting sequence with TTCN PAM
uuacagcugcuucuccuucc

SEQ ID NO: 22486 - RNA, 20 nt, Artificial Sequence
  targeting sequence with TTCN PAM
ccuuccuuucucaccaagac

SEQ ID NO: 22487 - RNA, 20 nt, Artificial Sequence
  targeting sequence with TTCN PAM
uuucucaccaagacuagccu

SEQ ID NO: 22488 - RNA, 20 nt, Artificial Sequence
  targeting sequence with TTCN PAM
caccaagacuagccugggua

SEQ ID NO: 22489 - RNA, 20 nt, Artificial Sequence
  targeting sequence with TTCN PAM
acccaggcuagucuugguga

SEQ ID NO: 22490 - RNA, 20 nt, Artificial Sequence
  targeting sequence with TTCN PAM
ccugggagaguuaguuugac

SEQ ID NO: 22491 - RNA, 20 nt, Artificial Sequence
  targeting sequence with TTCN PAM
agccugaccagagagaacaa

SEQ ID NO: 22492 - RNA, 20 nt, Artificial Sequence
  targeting sequence with TTCN PAM
cucuggucaggcuggaauuu

SEQ ID NO: 22493 - RNA, 20 nt, Artificial Sequence
  targeting sequence with TTCN PAM
auccaggccucaugucccca

SEQ ID NO: 22494 - RNA, 20 nt, Artificial Sequence
  targeting sequence with TTCN PAM
ccauggugagcagcccuccc

SEQ ID NO: 22495 - RNA, 20 nt, Artificial Sequence
  targeting sequence with TTCN PAM
cuguccuccuggccaacgug

SEQ ID NO: 22496 - RNA, 20 nt, Artificial Sequence
  targeting sequence with TTCN PAM
ugcaggccuuuguccagagc

SEQ ID NO: 22497 - RNA, 20 nt, Artificial Sequence
  targeting sequence with TTCN PAM
uuuagagggcagucauugag

SEQ ID NO: 22498 - RNA, 20 nt, Artificial Sequence
  targeting sequence with TTCN PAM
uaugccuuggcauccacuuu

SEQ ID NO: 22499 - RNA, 20 nt, Artificial Sequence
  targeting sequence with TTCN PAM
gugagaauuccugcacccgu

SEQ ID NO: 22500 - RNA, 20 nt, Artificial Sequence
  targeting sequence with TTCN PAM
cacggaaaaguggaugccaa

SEQ ID NO: 22501 - RNA, 20 nt, Artificial Sequence
  targeting sequence with TTCN PAM
ugcacccgugguggaaagag

SEQ ID NO: 22502 - RNA, 20 nt, Artificial Sequence
  targeting sequence with TTCN PAM
accacgggugcaggaauucu

SEQ ID NO: 22503 - RNA, 20 nt, Artificial Sequence
  targeting sequence with TTCN PAM
ccuuccccacagacuuuauu

SEQ ID NO: 22504 - RNA, 20 nt, Artificial Sequence
  targeting sequence with TTCN PAM
ccacagacuuuauucuucuc

SEQ ID NO: 22505 - RNA, 20 nt, Artificial Sequence
  targeting sequence with TTCN PAM
ucucaucugagagauggaaa

SEQ ID NO: 22506 - RNA, 20 nt, Artificial Sequence
  targeting sequence with TTCN PAM
caucugagagauggaaauaa

SEQ ID NO: 22507 - RNA, 20 nt, Artificial Sequence
  targeting sequence with TTCN PAM
aucucucagaugagaagaau

SEQ ID NO: 22508 - RNA, 20 nt, Artificial Sequence
  targeting sequence with TTCN PAM
ccacccuaagaggugggcau

SEQ ID NO: 22509 - RNA, 20 nt, Artificial Sequence
  targeting sequence with TTCN PAM
gauuucacgcaugggaaagc

SEQ ID NO: 22510 - RNA, 20 nt, Artificial Sequence
  targeting sequence with TTCN PAM
cgcaugggaaagcucauggc

SEQ ID NO: 22511 - RNA, 20 nt, Artificial Sequence
  targeting sequence with TTCN PAM
caugcgugaaaucagaaucu

SEQ ID NO: 22512 - RNA, 20 nt, Artificial Sequence
  targeting sequence with TTCN PAM
cucuccagguugaucgacau

SEQ ID NO: 22513 - RNA, 20 nt, Artificial Sequence
  targeting sequence with TTCN PAM
ugagguagguagcgcacagc

SEQ ID NO: 22514 - RNA, 20 nt, Artificial Sequence
  targeting sequence with TTCN PAM
gguaggucucagcagcauag

SEQ ID NO: 22515 - RNA, 20 nt, Artificial Sequence
  targeting sequence with TTCN PAM
ccucaccucaucccagcgcu

SEQ ID NO: 22516 - RNA, 20 nt, Artificial Sequence
  targeting sequence with TTCN PAM
gauggagagaagcugcccuc

SEQ ID NO: 22517 - RNA, 20 nt, Artificial Sequence
  targeting sequence with TTCN PAM
cuccaucugaaccccaaagg

SEQ ID NO: 22518 - RNA, 20 nt, Artificial Sequence
  targeting sequence with TTCN PAM
aucacgagggcagcuucucu

SEQ ID NO: 22519 - RNA, 20 nt, Artificial Sequence
  targeting sequence with TTCN PAM
uuccaucacgagggcagcuu

SEQ ID NO: 22520 - RNA, 20 nt, Artificial Sequence
  targeting sequence with TTCN PAM
agguuaaguuaccugacugc

SEQ ID NO: 22521 - RNA, 20 nt, Artificial Sequence
  targeting sequence with TTCN PAM
cugagccacagaaucgugga

SEQ ID NO: 22522 - RNA, 20 nt, Artificial Sequence
  targeting sequence with TTCN PAM
guggcucagagaauucgagg

SEQ ID NO: 22523 - RNA, 20 nt, Artificial Sequence
  targeting sequence with TTCN PAM
acuugucccuucauucaguc

SEQ ID NO: 22524 - RNA, 20 nt, Artificial Sequence
  targeting sequence with TTCN PAM
uucagucauugagaaaaucg

SEQ ID NO: 22525 - RNA, 20 nt, Artificial Sequence
  targeting sequence with TTCN PAM
gucauugagaaaaucguuac

SEQ ID NO: 22526 - RNA, 20 nt, Artificial Sequence
  targeting sequence with TTCN PAM
caaugacugaaugaagggac

SEQ ID NO: 22527 - RNA, 20 nt, Artificial Sequence
  targeting sequence with TTCN PAM
cacuaacauccccggugccu

SEQ ID NO: 22528 - RNA, 20 nt, Artificial Sequence
  targeting sequence with TTCN PAM
gccaaaaugcuacccagcag

SEQ ID NO: 22529 - RNA, 20 nt, Artificial Sequence
  targeting sequence with TTCN PAM
agauccagacugugagagcc

SEQ ID NO: 22530 - RNA, 20 nt, Artificial Sequence
  targeting sequence with TTCN PAM
ggggccaguuuuuucccucc

SEQ ID NO: 22531 - RNA, 20 nt, Artificial Sequence
  targeting sequence with TTCN PAM
cucccuucucugcccccacc

SEQ ID NO: 22532 - RNA, 20 nt, Artificial Sequence
  targeting sequence with TTCN PAM
cugcccccaccccacaacca

SEQ ID NO: 22533 - RNA, 20 nt, Artificial Sequence
  targeting sequence with TTCN PAM
cucuggugucaggggcugua

SEQ ID NO: 22534 - RNA, 20 nt, Artificial Sequence
  targeting sequence with TTCN PAM
uuacagccccugacaccaga

SEQ ID NO: 22535 - RNA, 20 nt, Artificial Sequence
  targeting sequence with TTCN PAM
cgcugaccuggcuaauucuu

SEQ ID NO: 22536 - RNA, 20 nt, Artificial Sequence
  targeting sequence with TTCN PAM
gccagccugaggcuggccac

SEQ ID NO: 22537 - RNA, 20 nt, Artificial Sequence
  targeting sequence with TTCN PAM
auggcucaacccccacccuc

SEQ ID NO: 22538 - RNA, 20 nt, Artificial Sequence
  targeting sequence with TTCN PAM
cugcagagaaauccaucccc

SEQ ID NO: 22539 - RNA, 20 nt, Artificial Sequence
  targeting sequence with TTCN PAM
cugcagggaacagggagcca

SEQ ID NO: 22540 - RNA, 20 nt, Artificial Sequence
  targeting sequence with TTCN PAM
cucuaaaauggaccaugaug

SEQ ID NO: 22541 - RNA, 20 nt, Artificial Sequence
  targeting sequence with TTCN PAM
cugagaggagccgucugacu

SEQ ID NO: 22542 - RNA, 20 nt, Artificial Sequence
  targeting sequence with TTCN PAM
gagagcagacaacagucaga

SEQ ID NO: 22543 - RNA, 20 nt, Artificial Sequence
  targeting sequence with TTCN PAM
caugacugaccucaucaccu

SEQ ID NO: 22544 - RNA, 20 nt, Artificial Sequence
  targeting sequence with TTCN PAM
caagagaaauuuauuagauu

SEQ ID NO: 22545 - RNA, 20 nt, Artificial Sequence
  targeting sequence with TTCN PAM
cuugagaagccaccauugcc

SEQ ID NO: 22546 - RNA, 20 nt, Artificial Sequence
  targeting sequence with TTCN PAM
caagcagcauagauuagagc

SEQ ID NO: 22547 - RNA, 20 nt, Artificial Sequence
  targeting sequence with TTCN PAM
aagaugcucuaaucuaugcu

SEQ ID NO: 22548 - RNA, 20 nt, Artificial Sequence
  targeting sequence with TTCN PAM
caccauggcucauguccggu

SEQ ID NO: 22549 - RNA, 20 nt, Artificial Sequence
  targeting sequence with TTCN PAM
ccuggccugacaggugguuc

SEQ ID NO: 22550 - RNA, 20 nt, Artificial Sequence
  targeting sequence with TTCN PAM
ggggcuuaggugagaagcag

SEQ ID NO: 22551 - RNA, 20 nt, Artificial Sequence
  targeting sequence with TTCN PAM
caccuaagccccagaaccac

SEQ ID NO: 22552 - RNA, 20 nt, Artificial Sequence
  targeting sequence with TTCN PAM
ugcuguauggacccacugac

SEQ ID NO: 22553 - RNA, 20 nt, Artificial Sequence
  targeting sequence with TTCN PAM
uaucaguugucaaagaugac

SEQ ID NO: 22554 - RNA, 20 nt, Artificial Sequence
  targeting sequence with TTCN PAM
guuuccuuaggugucgcccg

SEQ ID NO: 22555 - RNA, 20 nt, Artificial Sequence
  targeting sequence with TTCN PAM
uuaggugucgcccgcaauua

SEQ ID NO: 22556 - RNA, 20 nt, Artificial Sequence
  targeting sequence with TTCN PAM
uuuaauugcgggcgacaccu

SEQ ID NO: 22557 - RNA, 20 nt, Artificial Sequence
  targeting sequence with TTCN PAM
gauucugugccgcuucugug

SEQ ID NO: 22558 - RNA, 20 nt, Artificial Sequence
  targeting sequence with TTCN PAM
gugccgcuucugugguccag

SEQ ID NO: 22559 - RNA, 20 nt, Artificial Sequence
  targeting sequence with TTCN PAM
gugguccagaaacagacugu

SEQ ID NO: 22560 - RNA, 20 nt, Artificial Sequence
  targeting sequence with TTCN PAM
ggaccacagaagcggcacag

SEQ ID NO: 22561 - RNA, 20 nt, Artificial Sequence
  targeting sequence with TTCN PAM
guaacaacacagucuguuuc

SEQ ID NO: 22562 - RNA, 20 nt, Artificial Sequence
  targeting sequence with TTCN PAM
aagagcugauuuguuuuugc

SEQ ID NO: 22563 - RNA, 20 nt, Artificial Sequence
  targeting sequence with TTCN PAM
aaaacaaaaggcaauuaaca

SEQ ID NO: 22564 - RNA, 20 nt, Artificial Sequence
  targeting sequence with TTCN PAM
guggguaguuuuuuggggga

SEQ ID NO: 22565 - RNA, 20 nt, Artificial Sequence
  targeting sequence with TTCN PAM
gccaaguacaguguuuucau

SEQ ID NO: 22566 - RNA, 20 nt, Artificial Sequence
  targeting sequence with TTCN PAM
ugggggcugcaggggcagcu

SEQ ID NO: 22567 - RNA, 20 nt, Artificial Sequence
  targeting sequence with TTCN PAM
uuugcuccuucccccaggcc

SEQ ID NO: 22568 - RNA, 20 nt, Artificial Sequence
  targeting sequence with TTCN PAM
cccaggccuuugcuuugggu

SEQ ID NO: 22569 - RNA, 20 nt, Artificial Sequence
  targeting sequence with TTCN PAM
cacccaaagcaaaggccugg

SEQ ID NO: 22570 - RNA, 20 nt, Artificial Sequence
  targeting sequence with TTCN PAM
cugcuagccacugagcauac

SEQ ID NO: 22571 - RNA, 20 nt, Artificial Sequence
  targeting sequence with TTCN PAM
ucaaagcgaucguucucugc

SEQ ID NO: 22572 - RNA, 20 nt, Artificial Sequence
  targeting sequence with TTCN PAM
gggcuuccucaaagcgaucg

SEQ ID NO: 22573 - RNA, 20 nt, Artificial Sequence
  targeting sequence with TTCN PAM
agaaggagcaggagaaguua

SEQ ID NO: 22574 - RNA, 20 nt, Artificial Sequence
  targeting sequence with TTCN PAM
agaaggugacagucuguguu

SEQ ID NO: 22575 - RNA, 20 nt, Artificial Sequence
  targeting sequence with TTCN PAM
augcuccacagucuuucacc

SEQ ID NO: 22576 - RNA, 20 nt, Artificial Sequence
  targeting sequence with TTCN PAM
cguuuaauccucgcaacagc

SEQ ID NO: 22577 - RNA, 20 nt, Artificial Sequence
  targeting sequence with TTCN PAM
cauuuugcagaugagaaaac

SEQ ID NO: 22578 - RNA, 20 nt, Artificial Sequence
  targeting sequence with TTCN PAM
caucugcaaaaugggaauca

SEQ ID NO: 22579 - RNA, 20 nt, Artificial Sequence
  targeting sequence with TTCN PAM
guuuucucaucugcaaaaug

SEQ ID NO: 22580 - RNA, 20 nt, Artificial Sequence
  targeting sequence with TTCN PAM
ccucuuuacccuucaguuuu

SEQ ID NO: 22581 - RNA, 20 nt, Artificial Sequence
  targeting sequence with TTCN PAM
ucaccucuuuacccuucagu

SEQ ID NO: 22582 - RNA, 20 nt, Artificial Sequence
  targeting sequence with TTCN PAM
ggcaaauuucuucaccucuu

SEQ ID NO: 22583 - RNA, 20 nt, Artificial Sequence
  targeting sequence with TTCN PAM
uagcuaggaaguggcaggga

SEQ ID NO: 22584 - RNA, 20 nt, Artificial Sequence
  targeting sequence with TTCN PAM
uagcuaugaaacuucaggca

SEQ ID NO: 22585 - RNA, 20 nt, Artificial Sequence
  targeting sequence with TTCN PAM
caguagagaccaugccucac

SEQ ID NO: 22586 - RNA, 20 nt, Artificial Sequence
  targeting sequence with TTCN PAM
auucucaguagagaccaugc

SEQ ID NO: 22587 - RNA, 20 nt, Artificial Sequence
  targeting sequence with TTCN PAM
auuucuggcucagauaaacg

SEQ ID NO: 22588 - RNA, 20 nt, Artificial Sequence
  targeting sequence with TTCN PAM
ggcucagauaaacgggugac

SEQ ID NO: 22589 - RNA, 20 nt, Artificial Sequence
  targeting sequence with TTCN PAM
gcuccucaagaauucuguug

SEQ ID NO: 22590 - RNA, 20 nt, Artificial Sequence
  targeting sequence with TTCN PAM
ugaggagcagaagucacccg

SEQ ID NO: 22591 - RNA, 20 nt, Artificial Sequence
  targeting sequence with TTCN PAM
guugguaaaaugggcugcac

SEQ ID NO: 22592 - RNA, 20 nt, Artificial Sequence
  targeting sequence with TTCN PAM
gaugcuguuguacgcugugu

SEQ ID NO: 22593 - RNA, 20 nt, Artificial Sequence
  targeting sequence with TTCN PAM
auacuugcuuuaacuccuau

SEQ ID NO: 22594 - RNA, 20 nt, Artificial Sequence
  targeting sequence with TTCN PAM
cugauguuauuaaucauauu

SEQ ID NO: 22595 - RNA, 20 nt, Artificial Sequence
  targeting sequence with TTCN PAM
cucucugugucaggcccugg

SEQ ID NO: 22596 - RNA, 20 nt, Artificial Sequence
  targeting sequence with TTCN PAM
agguuacauagguuaagugc

SEQ ID NO: 22597 - RNA, 20 nt, Artificial Sequence
  targeting sequence with TTCN PAM
uccuugcacagcuguuggca

SEQ ID NO: 22598 - RNA, 20 nt, Artificial Sequence
  targeting sequence with TTCN PAM
ggcucugcugcugacuagau

SEQ ID NO: 22599 - RNA, 20 nt, Artificial Sequence
  targeting sequence with TTCN PAM
ccagucagagagguacuggu

SEQ ID NO: 22600 - RNA, 20 nt, Artificial Sequence
  targeting sequence with TTCN PAM
guuuugcugccuauuuagcc

SEQ ID NO: 22601 - RNA, 20 nt, Artificial Sequence
  targeting sequence with TTCN PAM
aauggaaguuggguguuuga

SEQ ID NO: 22602 - RNA, 20 nt, Artificial Sequence
  targeting sequence with TTCN PAM
auuagaaggcuaaauaggca

SEQ ID NO: 22603 - RNA, 20 nt, Artificial Sequence
  targeting sequence with TTCN PAM
auagcaucugauuuacgcuu

SEQ ID NO: 22604 - RNA, 20 nt, Artificial Sequence
  targeting sequence with TTCN PAM
auaugguaaccguugcccuc

SEQ ID NO: 22605 - RNA, 20 nt, Artificial Sequence
  targeting sequence with TTCN PAM
gcaauguguccagagagggc

SEQ ID NO: 22606 - RNA, 20 nt, Artificial Sequence
  targeting sequence with TTCN PAM
guugaggggcuccaacaggg

SEQ ID NO: 22607 - RNA, 20 nt, Artificial Sequence
  targeting sequence with TTCN PAM
augagggcuuucgguugagg

SEQ ID NO: 22608 - RNA, 20 nt, Artificial Sequence
  targeting sequence with TTCN PAM
cugcugcuucagcauuucca

SEQ ID NO: 22609 - RNA, 20 nt, Artificial Sequence
  targeting sequence with TTCN PAM
gcauuuccagagcacccagu

SEQ ID NO: 22610 - RNA, 20 nt, Artificial Sequence
  targeting sequence with TTCN PAM
agagcacccaguugcugaag

SEQ ID NO: 22611 - RNA, 20 nt, Artificial Sequence
  targeting sequence with TTCN PAM
gcaacugggugcucuggaaa

SEQ ID NO: 22612 - RNA, 20 nt, Artificial Sequence
  targeting sequence with TTCN PAM
aagaauccaucaccauagua

SEQ ID NO: 22613 - RNA, 20 nt, Artificial Sequence
  targeting sequence with TTCN PAM
uggaagggcagacacagaca

SEQ ID NO: 22614 - RNA, 20 nt, Artificial Sequence
  targeting sequence with TTCN PAM
caucuacaaccucuugucug

SEQ ID NO: 22615 - RNA, 20 nt, Artificial Sequence
  targeting sequence with TTCN PAM
guucucaucuacaaccucuu

SEQ ID NO: 22616 - RNA, 20 nt, Artificial Sequence
  targeting sequence with TTCN PAM
ccuucucugaaggcggagga

SEQ ID NO: 22617 - RNA, 20 nt, Artificial Sequence
  targeting sequence with TTCN PAM
cugaaggcggaggauuagga

SEQ ID NO: 22618 - RNA, 20 nt, Artificial Sequence
  targeting sequence with TTCN PAM
gagaaggagaaggucuggcc

SEQ ID NO: 22619 - RNA, 20 nt, Artificial Sequence
  targeting sequence with TTCN PAM
cuggcagccaccaacaucuc

SEQ ID NO: 22620 - RNA, 20 nt, Artificial Sequence
  targeting sequence with TTCN PAM
gaguaccuacuacguggcca

SEQ ID NO: 22621 - RNA, 20 nt, Artificial Sequence
  targeting sequence with TTCN PAM
uauacuguuuaacagauauu

SEQ ID NO: 22622 - RNA, 20 nt, Artificial Sequence
  targeting sequence with TTCN PAM
caaaugguugugauaacuga

SEQ ID NO: 22623 - RNA, 20 nt, Artificial Sequence
  targeting sequence with TTCN PAM
aaguggucauugaaaagcag

SEQ ID NO: 22624 - RNA, 20 nt, Artificial Sequence
  targeting sequence with TTCN PAM
augaccacuuugaaggaucu

SEQ ID NO: 22625 - RNA, 20 nt, Artificial Sequence
  targeting sequence with TTCN PAM
aaugacugcuuuucaaugac

SEQ ID NO: 22626 - RNA, 20 nt, Artificial Sequence
  targeting sequence with TTCN PAM
gggaccuugggugugacacu

SEQ ID NO: 22627 - RNA, 20 nt, Artificial Sequence
  targeting sequence with TTCN PAM
uugcucauaaaaagggggau

SEQ ID NO: 22628 - RNA, 20 nt, Artificial Sequence
  targeting sequence with TTCN PAM
uucuucauaagucuguggug

SEQ ID NO: 22629 - RNA, 20 nt, Artificial Sequence
  targeting sequence with TTCN PAM
ucauaagucuguggugagga

SEQ ID NO: 22630 - RNA, 20 nt, Artificial Sequence
  targeting sequence with TTCN PAM
uaagucuguggugaggaucc

SEQ ID NO: 22631 - RNA, 20 nt, Artificial Sequence
  targeting sequence with TTCN PAM
aucaccuuaggagucacaaa

SEQ ID NO: 22632 - RNA, 20 nt, Artificial Sequence
  targeting sequence with TTCN PAM
agggcaaaguuuugugacuc

SEQ ID NO: 22633 - RNA, 20 nt, Artificial Sequence
  targeting sequence with TTCN PAM
gcccccugcucauuccaggg

SEQ ID NO: 22634 - RNA, 20 nt, Artificial Sequence
  targeting sequence with TTCN PAM
gugagguucugcccccugcu

SEQ ID NO: 22635 - RNA, 20 nt, Artificial Sequence
  targeting sequence with TTCN PAM
cucuuagacuuugcccugga

SEQ ID NO: 22636 - RNA, 20 nt, Artificial Sequence
  targeting sequence with TTCN PAM
agggcaaagucuaagaguga

SEQ ID NO: 22637 - RNA, 20 nt, Artificial Sequence
  targeting sequence with TTCN PAM
uuucugcaugcuuuucaaag

SEQ ID NO: 22638 - RNA, 20 nt, Artificial Sequence
  targeting sequence with TTCN PAM
gcaugcuuuucaaagucagu

SEQ ID NO: 22639 - RNA, 20 nt, Artificial Sequence
  targeting sequence with TTCN PAM
aagucagucgccuuuuccca

SEQ ID NO: 22640 - RNA, 20 nt, Artificial Sequence
  targeting sequence with TTCN PAM
cagccaaaaaggaauuuauc

SEQ ID NO: 22641 - RNA, 20 nt, Artificial Sequence
  targeting sequence with TTCN PAM
uuuuuggcugggaaaaggcg

SEQ ID NO: 22642 - RNA, 20 nt, Artificial Sequence
  targeting sequence with TTCN PAM
aggauguagccuugguuauu

SEQ ID NO: 22643 - RNA, 20 nt, Artificial Sequence
  targeting sequence with TTCN PAM
cuaaauaaccaaggcuacau

SEQ ID NO: 22644 - RNA, 20 nt, Artificial Sequence
  targeting sequence with TTCN PAM
uugcugggauggcgcuucuc

SEQ ID NO: 22645 - RNA, 20 nt, Artificial Sequence
  targeting sequence with TTCN PAM
aaagcagcccugugcaagcc

SEQ ID NO: 22646 - RNA, 20 nt, Artificial Sequence
  targeting sequence with TTCN PAM
ucccuccaccacuccuacag

SEQ ID NO: 22647 - RNA, 20 nt, Artificial Sequence
  targeting sequence with TTCN PAM
acaaggcugggcgacagaga

SEQ ID NO: 22648 - RNA, 20 nt, Artificial Sequence
  targeting sequence with TTCN PAM
cucugucgcccagccuugug

SEQ ID NO: 22649 - RNA, 20 nt, Artificial Sequence
  targeting sequence with TTCN PAM
caagccccacucugacacca

SEQ ID NO: 22650 - RNA, 20 nt, Artificial Sequence
  targeting sequence with TTCN PAM
gauguuuaucuuggugucag

SEQ ID NO: 22651 - RNA, 20 nt, Artificial Sequence
  targeting sequence with TTCN PAM
aguuugcccaucagaauggu

SEQ ID NO: 22652 - RNA, 20 nt, Artificial Sequence
  targeting sequence with TTCN PAM
gaugggcaaacuggaaaaag

SEQ ID NO: 22653 - RNA, 20 nt, Artificial Sequence
  targeting sequence with TTCN PAM
gagcauaucucuccccugcu

SEQ ID NO: 22654 - RNA, 20 nt, Artificial Sequence
  targeting sequence with TTCN PAM
cauuuaauuaaaaaaauuua

SEQ ID NO: 22655 - RNA, 20 nt, Artificial Sequence
  targeting sequence with TTCN PAM
ucuucucauuuaauuaaaaa

SEQ ID NO: 22656 - RNA, 20 nt, Artificial Sequence
  targeting sequence with TTCN PAM
uacucaucccagccaggaaa

SEQ ID NO: 22657 - RNA, 20 nt, Artificial Sequence
  targeting sequence with TTCN PAM
uggcugggaugaguaagaau

SEQ ID NO: 22658 - RNA, 20 nt, Artificial Sequence
  targeting sequence with TTCN PAM
auauugcuuucuuucacaag

SEQ ID NO: 22659 - RNA, 20 nt, Artificial Sequence
  targeting sequence with TTCN PAM
uucacaagacuucccaugau

SEQ ID NO: 22660 - RNA, 20 nt, Artificial Sequence
  targeting sequence with TTCN PAM
caagacuucccaugauguac

SEQ ID NO: 22661 - RNA, 20 nt, Artificial Sequence
  targeting sequence with TTCN PAM
caugauguacugaaggagua

SEQ ID NO: 22662 - RNA, 20 nt, Artificial Sequence
  targeting sequence with TTCN PAM
guacaucaugggaagucuug

SEQ ID NO: 22663 - RNA, 20 nt, Artificial Sequence
  targeting sequence with TTCN PAM
acuacuccuucaguacauca

SEQ ID NO: 22664 - RNA, 20 nt, Artificial Sequence
  targeting sequence with TTCN PAM
acuuccacuacuccuucagu

SEQ ID NO: 22665 - RNA, 20 nt, Artificial Sequence
  targeting sequence with TTCN PAM
ucuccacuggacaaggccac

SEQ ID NO: 22666 - RNA, 20 nt, Artificial Sequence
  targeting sequence with TTCN PAM
ccacuggacaaggccacaug

SEQ ID NO: 22667 - RNA, 20 nt, Artificial Sequence
  targeting sequence with TTCN PAM
caccccugcauguggccuug

SEQ ID NO: 22668 - RNA, 20 nt, Artificial Sequence
  targeting sequence with TTCN PAM
augccaguguuuuucccacc

SEQ ID NO: 22669 - RNA, 20 nt, Artificial Sequence
  targeting sequence with TTCN PAM
ugagcucugcaugcccaucu

SEQ ID NO: 22670 - RNA, 20 nt, Artificial Sequence
  targeting sequence with TTCN PAM
aacuguaagcaugacucugu

SEQ ID NO: 22671 - RNA, 20 nt, Artificial Sequence
  targeting sequence with TTCN PAM
guuugggccagugccuuaug

SEQ ID NO: 22672 - RNA, 20 nt, Artificial Sequence
  targeting sequence with TTCN PAM
gauaggagcagcagagggaa

SEQ ID NO: 22673 - RNA, 20 nt, Artificial Sequence
  targeting sequence with TTCN PAM
cucugcugcuccuaucagaa

SEQ ID NO: 22674 - RNA, 20 nt, Artificial Sequence
  targeting sequence with TTCN PAM
ugcucaucuuaugccucuuc

SEQ ID NO: 22675 - RNA, 20 nt, Artificial Sequence
  targeting sequence with TTCN PAM
gacacaucuugggucuugcu

SEQ ID NO: 22676 - RNA, 20 nt, Artificial Sequence
  targeting sequence with TTCN PAM
ccugggggagcgacagcugc

SEQ ID NO: 22677 - RNA, 20 nt, Artificial Sequence
  targeting sequence with TTCN PAM
agaucucucacugcacccuc

SEQ ID NO: 22678 - RNA, 20 nt, Artificial Sequence
  targeting sequence with TTCN PAM
uagguggacagggcauaagg

SEQ ID NO: 22679 - RNA, 20 nt, Artificial Sequence
  targeting sequence with TTCN PAM
ccauccuggaguggcccuac

SEQ ID NO: 22680 - RNA, 20 nt, Artificial Sequence
  targeting sequence with TTCN PAM
ccucacuacacuuugucccu

SEQ ID NO: 22681 - RNA, 20 nt, Artificial Sequence
  targeting sequence with TTCN PAM
cccaccacacagugucugug

SEQ ID NO: 22682 - RNA, 20 nt, Artificial Sequence
  targeting sequence with TTCN PAM
cagcaucaguucucccacca

SEQ ID NO: 22683 - RNA, 20 nt, Artificial Sequence
  targeting sequence with TTCN PAM
ccucccacccgcugcacaca

SEQ ID NO: 22684 - RNA, 20 nt, Artificial Sequence
  targeting sequence with TTCN PAM
gggcaggaucugcugugugc

SEQ ID NO: 22685 - RNA, 20 nt, Artificial Sequence
  targeting sequence with TTCN PAM
accacuuccagcguuuggca

SEQ ID NO: 22686 - RNA, 20 nt, Artificial Sequence
  targeting sequence with TTCN PAM
agcguuuggcagagcuguac

SEQ ID NO: 22687 - RNA, 20 nt, Artificial Sequence
  targeting sequence with TTCN PAM
auccagucugcugcucuuua

SEQ ID NO: 22688 - RNA, 20 nt, Artificial Sequence
  targeting sequence with TTCN PAM
cugugaccaguggguuacau

SEQ ID NO: 22689 - RNA, 20 nt, Artificial Sequence
  targeting sequence with TTCN PAM
ucagcaguucacugugacca

SEQ ID NO: 22690 - RNA, 20 nt, Artificial Sequence
  targeting sequence with TTCN PAM
cagaggagaccaagauuccu

SEQ ID NO: 22691 - RNA, 20 nt, Artificial Sequence
  targeting sequence with TTCN PAM
ucccagaggagaccaagauu

SEQ ID NO: 22692 - RNA, 20 nt, Artificial Sequence
  targeting sequence with TTCN PAM
uugauugacuguuugucugc

SEQ ID NO: 22693 - RNA, 20 nt, Artificial Sequence
  targeting sequence with TTCN PAM
ggagcccacugcuugaugca

SEQ ID NO: 22694 - RNA, 20 nt, Artificial Sequence
  targeting sequence with TTCN PAM
agcucuggaucacaauucag

SEQ ID NO: 22695 - RNA, 20 nt, Artificial Sequence
  targeting sequence with TTCN PAM
ucagugcaggcuuugaugac

SEQ ID NO: 22696 - RNA, 20 nt, Artificial Sequence
  targeting sequence with TTCN PAM
cugagucaucaaagccugca

SEQ ID NO: 22697 - RNA, 20 nt, Artificial Sequence
  targeting sequence with TTCN PAM
augaggcccucuccuucagu

SEQ ID NO: 22698 - RNA, 20 nt, Artificial Sequence
  targeting sequence with TTCN PAM
guagggcgaaggcccagauu

SEQ ID NO: 22699 - RNA, 20 nt, Artificial Sequence
  targeting sequence with TTCN PAM
cccuacugaaggagagggcc

SEQ ID NO: 22700 - RNA, 20 nt, Artificial Sequence
  targeting sequence with TTCN PAM
ucagcaauucacuuucccuc

SEQ ID NO: 22701 - RNA, 20 nt, Artificial Sequence
  targeting sequence with TTCN PAM
gcaauucacuuucccucucu

SEQ ID NO: 22702 - RNA, 20 nt, Artificial Sequence
  targeting sequence with TTCN PAM
cuuucccucucugucccuca

SEQ ID NO: 22703 - RNA, 20 nt, Artificial Sequence
  targeting sequence with TTCN PAM
cucucugucccucaguuucc

SEQ ID NO: 22704 - RNA, 20 nt, Artificial Sequence
  targeting sequence with TTCN PAM
uucucugugaaacuagagug

SEQ ID NO: 22705 - RNA, 20 nt, Artificial Sequence
  targeting sequence with TTCN PAM
cugugaaacuagaguguugg

SEQ ID NO: 22706 - RNA, 20 nt, Artificial Sequence
  targeting sequence with TTCN PAM
cagagaaggaaacugaggga

SEQ ID NO: 22707 - RNA, 20 nt, Artificial Sequence
  targeting sequence with TTCN PAM
cauuggcaaaaauguguuga

SEQ ID NO: 22708 - RNA, 20 nt, Artificial Sequence
  targeting sequence with TTCN PAM
guagcauaaaaauccauacu

SEQ ID NO: 22709 - RNA, 20 nt, Artificial Sequence
  targeting sequence with TTCN PAM
ucaaaucccaaaguauggau

SEQ ID NO: 22710 - RNA, 20 nt, Artificial Sequence
  targeting sequence with TTCN PAM
aagaguucgucaaaucccaa

SEQ ID NO: 22711 - RNA, 20 nt, Artificial Sequence
  targeting sequence with TTCN PAM
gcauccugcugguuguggaa

SEQ ID NO: 22712 - RNA, 20 nt, Artificial Sequence
  targeting sequence with TTCN PAM
acaaccagcaggaugcagaa

SEQ ID NO: 22713 - RNA, 20 nt, Artificial Sequence
  targeting sequence with TTCN PAM
cugcaaaaaguuguugagau

SEQ ID NO: 22714 - RNA, 20 nt, Artificial Sequence
  targeting sequence with TTCN PAM
accaucucaacaacuuuuug

SEQ ID NO: 22715 - RNA, 20 nt, Artificial Sequence
  targeting sequence with TTCN PAM
ucaaccaucucaacaacuuu

SEQ ID NO: 22716 - RNA, 20 nt, Artificial Sequence
  targeting sequence with TTCN PAM
ccugaccucuugcuaaccaa

SEQ ID NO: 22717 - RNA, 20 nt, Artificial Sequence
  targeting sequence with TTCN PAM
aaauuuugccucaucgcaau

SEQ ID NO: 22718 - RNA, 20 nt, Artificial Sequence
  targeting sequence with TTCN PAM
ccacccaccugacugcacau

SEQ ID NO: 22719 - RNA, 20 nt, Artificial Sequence
  targeting sequence with TTCN PAM
ucuccacccaccugacugca

SEQ ID NO: 22720 - RNA, 20 nt, Artificial Sequence
  targeting sequence with TTCN PAM
gugaaccagugccagcugca

SEQ ID NO: 22721 - RNA, 20 nt, Artificial Sequence
  targeting sequence with TTCN PAM
cagaaagggcccaauucuuc

SEQ ID NO: 22722 - RNA, 20 nt, Artificial Sequence
  targeting sequence with TTCN PAM
gugcaucuccucgauuugcu

SEQ ID NO: 22723 - RNA, 20 nt, Artificial Sequence
  targeting sequence with TTCN PAM
caaauguaaucauuucacca

SEQ ID NO: 22724 - RNA, 20 nt, Artificial Sequence
  targeting sequence with TTCN PAM
ccaggaucagacaacuguag

SEQ ID NO: 22725 - RNA, 20 nt, Artificial Sequence
  targeting sequence with TTCN PAM
caaagccaaacuugcaccaa

SEQ ID NO: 22726 - RNA, 20 nt, Artificial Sequence
  targeting sequence with TTCN PAM
caguccagccguggagcugg

SEQ ID NO: 22727 - RNA, 20 nt, Artificial Sequence
  targeting sequence with TTCN PAM
caaucagaugugagguguga

SEQ ID NO: 22728 - RNA, 20 nt, Artificial Sequence
  targeting sequence with TTCN PAM
augcaacaacaacaaaacau

SEQ ID NO: 22729 - RNA, 20 nt, Artificial Sequence
  targeting sequence with TTCN PAM
uauucuaugcaacaacaaca

SEQ ID NO: 22730 - RNA, 20 nt, Artificial Sequence
  targeting sequence with TTCN PAM
aaacgacuauauuuucauuu

SEQ ID NO: 22731 - RNA, 20 nt, Artificial Sequence
  targeting sequence with TTCN PAM
uuuucuaucagcucaugagg

SEQ ID NO: 22732 - RNA, 20 nt, Artificial Sequence
  targeting sequence with TTCN PAM
aucagcucaugaggcaccca

SEQ ID NO: 22733 - RNA, 20 nt, Artificial Sequence
  targeting sequence with TTCN PAM
ccuucccaauuugcuucaaa

SEQ ID NO: 22734 - RNA, 20 nt, Artificial Sequence
  targeting sequence with TTCN PAM
caauuugcuucaaaugccaa

SEQ ID NO: 22735 - RNA, 20 nt, Artificial Sequence
  targeting sequence with TTCN PAM
aaugccaaacaaccguagaa

SEQ ID NO: 22736 - RNA, 20 nt, Artificial Sequence
  targeting sequence with TTCN PAM
acgguuguuuggcauuugaa

SEQ ID NO: 22737 - RNA, 20 nt, Artificial Sequence
  targeting sequence with TTCN PAM
ucggcaacuucuccuguagu

SEQ ID NO: 22738 - RNA, 20 nt, Artificial Sequence
  targeting sequence with TTCN PAM
gcaacuucuccuguaguugu

SEQ ID NO: 22739 - RNA, 20 nt, Artificial Sequence
  targeting sequence with TTCN PAM
ccuguaguugugagaggauc

SEQ ID NO: 22740 - RNA, 20 nt, Artificial Sequence
  targeting sequence with TTCN PAM
augauugcucucgguuguug

SEQ ID NO: 22741 - RNA, 20 nt, Artificial Sequence
  targeting sequence with TTCN PAM
aguggccggccacuaugcuc

SEQ ID NO: 22742 - RNA, 20 nt, Artificial Sequence
  targeting sequence with TTCN PAM
agccucucaucuccuuugca

SEQ ID NO: 22743 - RNA, 20 nt, Artificial Sequence
  targeting sequence with TTCN PAM
ugaaccaccacugcacugua

SEQ ID NO: 22744 - RNA, 20 nt, Artificial Sequence
  targeting sequence with TTCN PAM
agaaguuuugcaaaggagau

SEQ ID NO: 22745 - RNA, 20 nt, Artificial Sequence
  targeting sequence with TTCN PAM
ugggccaaaugcguugucga

SEQ ID NO: 22746 - RNA, 20 nt, Artificial Sequence
  targeting sequence with TTCN PAM
aaaugggucauaaagcaaca

SEQ ID NO: 22747 - RNA, 20 nt, Artificial Sequence
  targeting sequence with TTCN PAM
uauuugaguucaaaaugggu

SEQ ID NO: 22748 - RNA, 20 nt, Artificial Sequence
  targeting sequence with TTCN PAM
agcaguuuucuuauuugagu

SEQ ID NO: 22749 - RNA, 20 nt, Artificial Sequence
  targeting sequence with TTCN PAM
cgcuuuauguuuuuuugcua

SEQ ID NO: 22750 - RNA, 20 nt, Artificial Sequence
  targeting sequence with TTCN PAM
acgggcauuucucgcuuuau

SEQ ID NO: 22751 - RNA, 20 nt, Artificial Sequence
  targeting sequence with TTCN PAM
uaaaugugguuauguuauac

SEQ ID NO: 22752 - RNA, 20 nt, Artificial Sequence
  targeting sequence with TTCN PAM
acuaucaaacagcaaauucc

SEQ ID NO: 22753 - RNA, 20 nt, Artificial Sequence
  targeting sequence with TTCN PAM
agagccaauaugugagucuc

SEQ ID NO: 22754 - RNA, 20 nt, Artificial Sequence
  targeting sequence with TTCN PAM
uagccuuucccucccugucu

SEQ ID NO: 22755 - RNA, 20 nt, Artificial Sequence
  targeting sequence with TTCN PAM
cucccugucuccuuuuagag

SEQ ID NO: 22756 - RNA, 20 nt, Artificial Sequence
  targeting sequence with TTCN PAM
cuaaaaggagacagggaggg

SEQ ID NO: 22757 - RNA, 20 nt, Artificial Sequence
  targeting sequence with TTCN PAM
cuggccuucagcuucuuucu

SEQ ID NO: 22758 - RNA, 20 nt, Artificial Sequence
  targeting sequence with TTCN PAM
gcuucuuucucuauaaaaua

SEQ ID NO: 22759 - RNA, 20 nt, Artificial Sequence
  targeting sequence with TTCN PAM
uucucuauaaaauagggaua

SEQ ID NO: 22760 - RNA, 20 nt, Artificial Sequence
  targeting sequence with TTCN PAM
cuauaaaauagggauaacag

SEQ ID NO: 22761 - RNA, 20 nt, Artificial Sequence
  targeting sequence with TTCN PAM
aauauuaacucgucuaaucc

SEQ ID NO: 22762 - RNA, 20 nt, Artificial Sequence
  targeting sequence with TTCN PAM
cgccagcuuucccugaccug

SEQ ID NO: 22763 - RNA, 20 nt, Artificial Sequence
  targeting sequence with TTCN PAM
cugaccugcucccuccagcu

SEQ ID NO: 22764 - RNA, 20 nt, Artificial Sequence
  targeting sequence with TTCN PAM
cuuuuuucagagaugagguc

SEQ ID NO: 22765 - RNA, 20 nt, Artificial Sequence
  targeting sequence with TTCN PAM
gagaugaggucucugucgcc

SEQ ID NO: 22766 - RNA, 20 nt, Artificial Sequence
  targeting sequence with TTCN PAM
cgccguucuuugaccucuca

SEQ ID NO: 22767 - RNA, 20 nt, Artificial Sequence
  targeting sequence with TTCN PAM
uugaccucucaaaugcccug

SEQ ID NO: 22768 - RNA, 20 nt, Artificial Sequence
  targeting sequence with TTCN PAM
accuugggcauuucuuuccc

SEQ ID NO: 22769 - RNA, 20 nt, Artificial Sequence
  targeting sequence with TTCN PAM
uucccucuaaucugugcuga

SEQ ID NO: 22770 - RNA, 20 nt, Artificial Sequence
  targeting sequence with TTCN PAM
cucuaaucugugcugacuuc

SEQ ID NO: 22771 - RNA, 20 nt, Artificial Sequence
  targeting sequence with TTCN PAM
cagcacauuuuuugccucuu

SEQ ID NO: 22772 - RNA, 20 nt, Artificial Sequence
  targeting sequence with TTCN PAM
caagaggcaaaaaaugugcu

SEQ ID NO: 22773 - RNA, 20 nt, Artificial Sequence
  targeting sequence with TTCN PAM
ugccagacuuucccaagagg

SEQ ID NO: 22774 - RNA, 20 nt, Artificial Sequence
  targeting sequence with TTCN PAM
cacagcagggucaguggucu

SEQ ID NO: 22775 - RNA, 20 nt, Artificial Sequence
  targeting sequence with TTCN PAM
cuuacagucuuuggcuuucc

SEQ ID NO: 22776 - RNA, 20 nt, Artificial Sequence
  targeting sequence with TTCN PAM
ugaaacgagacccccucagg

SEQ ID NO: 22777 - RNA, 20 nt, Artificial Sequence
  targeting sequence with TTCN PAM
ggaaagccaaagacuguaag

SEQ ID NO: 22778 - RNA, 20 nt, Artificial Sequence
  targeting sequence with TTCN PAM
cuccaggugagcaccugaua

SEQ ID NO: 22779 - RNA, 20 nt, Artificial Sequence
  targeting sequence with TTCN PAM
agccuaaguugagucugggc

SEQ ID NO: 22780 - RNA, 20 nt, Artificial Sequence
  targeting sequence with TTCN PAM
cucagacuuuucucucgcug

SEQ ID NO: 22781 - RNA, 20 nt, Artificial Sequence
  targeting sequence with TTCN PAM
cucgcugcucccuguccucu

SEQ ID NO: 22782 - RNA, 20 nt, Artificial Sequence
  targeting sequence with TTCN PAM
ucaccuggggcauggggcug

SEQ ID NO: 22783 - RNA, 20 nt, Artificial Sequence
  targeting sequence with TTCN PAM
gcugggauaagagccagggc

SEQ ID NO: 22784 - RNA, 20 nt, Artificial Sequence
  targeting sequence with TTCN PAM
uucauucaauaaaugccuac

SEQ ID NO: 22785 - RNA, 20 nt, Artificial Sequence
  targeting sequence with TTCN PAM
uucaauaaaugccuacuacg

SEQ ID NO: 22786 - RNA, 20 nt, Artificial Sequence
  targeting sequence with TTCN PAM
auaaaugccuacuacgugac

SEQ ID NO: 22787 - RNA, 20 nt, Artificial Sequence
  targeting sequence with TTCN PAM
ccaccgugucaccaggucuc

SEQ ID NO: 22788 - RNA, 20 nt, Artificial Sequence
  targeting sequence with TTCN PAM
ccugagggauuguccuguuu

SEQ ID NO: 22789 - RNA, 20 nt, Artificial Sequence
  targeting sequence with TTCN PAM
caggccucuaaacguuuccc

SEQ ID NO: 22790 - RNA, 20 nt, Artificial Sequence
  targeting sequence with TTCN PAM
uggaggagguguccucucag

SEQ ID NO: 22791 - RNA, 20 nt, Artificial Sequence
  targeting sequence with TTCN PAM
ggcugagaggacaccuccuc

SEQ ID NO: 22792 - RNA, 20 nt, Artificial Sequence
  targeting sequence with TTCN PAM
cucccuccuucuggcugaga

SEQ ID NO: 22793 - RNA, 20 nt, Artificial Sequence
  targeting sequence with TTCN PAM
cuugccccauuuuuauucuc

SEQ ID NO: 22794 - RNA, 20 nt, Artificial Sequence
  targeting sequence with TTCN PAM
uaauccuccuccacuucacu

SEQ ID NO: 22795 - RNA, 20 nt, Artificial Sequence
  targeting sequence with TTCN PAM
gcauccagggcccagcagag

SEQ ID NO: 22796 - RNA, 20 nt, Artificial Sequence
  targeting sequence with TTCN PAM
gggcaagacuggaaagggaa

SEQ ID NO: 22797 - RNA, 20 nt, Artificial Sequence
  targeting sequence with TTCN PAM
agucuugcccugaaucagug

SEQ ID NO: 22798 - RNA, 20 nt, Artificial Sequence
  targeting sequence with TTCN PAM
cuuuccagucuugcccugaa

SEQ ID NO: 22799 - RNA, 20 nt, Artificial Sequence
  targeting sequence with TTCN PAM
gguccuuccuggauacaugg

SEQ ID NO: 22800 - RNA, 20 nt, Artificial Sequence
  targeting sequence with TTCN PAM
uggauacauggcaucuuucc

SEQ ID NO: 22801 - RNA, 20 nt, Artificial Sequence
  targeting sequence with TTCN PAM
cagaggaaaggacuccccug

SEQ ID NO: 22802 - RNA, 20 nt, Artificial Sequence
  targeting sequence with TTCN PAM
ucugggaaagaugccaugua

SEQ ID NO: 22803 - RNA, 20 nt, Artificial Sequence
  targeting sequence with TTCN PAM
cucugggacguuacuuagcu

SEQ ID NO: 22804 - RNA, 20 nt, Artificial Sequence
  targeting sequence with TTCN PAM
cuaccuagugcaguagaacc

SEQ ID NO: 22805 - RNA, 20 nt, Artificial Sequence
  targeting sequence with TTCN PAM
acugcacuagguagggaagc

SEQ ID NO: 22806 - RNA, 20 nt, Artificial Sequence
  targeting sequence with TTCN PAM
ucuuguucuuacccuggaaa

SEQ ID NO: 22807 - RNA, 20 nt, Artificial Sequence
  targeting sequence with TTCN PAM
uacccuggaaaggauguggu

SEQ ID NO: 22808 - RNA, 20 nt, Artificial Sequence
  targeting sequence with TTCN PAM
aggguaagaacaagaugaac

SEQ ID NO: 22809 - RNA, 20 nt, Artificial Sequence
  targeting sequence with TTCN PAM
uggguucuuggagcuaacaa

SEQ ID NO: 22810 - RNA, 20 nt, Artificial Sequence
  targeting sequence with TTCN PAM
uggagcuaacaaaagguaua

SEQ ID NO: 22811 - RNA, 20 nt, Artificial Sequence
  targeting sequence with TTCN PAM
auaccuuuuguuagcuccaa

SEQ ID NO: 22812 - RNA, 20 nt, Artificial Sequence
  targeting sequence with TTCN PAM
cacguaaauuucuauaccuu

SEQ ID NO: 22813 - RNA, 20 nt, Artificial Sequence
  targeting sequence with TTCN PAM
auuuaguucacacguaaauu

SEQ ID NO: 22814 - RNA, 20 nt, Artificial Sequence
  targeting sequence with TTCN PAM
gagcuuagcauuuucuauuu

SEQ ID NO: 22815 - RNA, 20 nt, Artificial Sequence
  targeting sequence with TTCN PAM
guucagagcuuagcauuuuc

SEQ ID NO: 22816 - RNA, 20 nt, Artificial Sequence
  targeting sequence with TTCN PAM
ucaguucagagcuuagcauu

SEQ ID NO: 22817 - RNA, 20 nt, Artificial Sequence
  targeting sequence with TTCN PAM
gaccaauuagggguuaagcu

SEQ ID NO: 22818 - RNA, 20 nt, Artificial Sequence
  targeting sequence with TTCN PAM
uaagugcucacaagaaagag

SEQ ID NO: 22819 - RNA, 20 nt, Artificial Sequence
  targeting sequence with TTCN PAM
ugugagcacuuaagaagggu

SEQ ID NO: 22820 - RNA, 20 nt, Artificial Sequence
  targeting sequence with TTCN PAM
aauaaagcuuuagaugguga

SEQ ID NO: 22821 - RNA, 20 nt, Artificial Sequence
  targeting sequence with TTCN PAM
aaauaagguauucuuaaccu

SEQ ID NO: 22822 - RNA, 20 nt, Artificial Sequence
  targeting sequence with TTCN PAM
uaaccuuuuguagacccuca

SEQ ID NO: 22823 - RNA, 20 nt, Artificial Sequence
  targeting sequence with TTCN PAM
gugugagggucuacaaaagg

SEQ ID NO: 22824 - RNA, 20 nt, Artificial Sequence
  targeting sequence with TTCN PAM
uuauuugucugcugagcuuc

SEQ ID NO: 22825 - RNA, 20 nt, Artificial Sequence
  targeting sequence with TTCN PAM
ggcagccucuagguacgaag

SEQ ID NO: 22826 - RNA, 20 nt, Artificial Sequence
  targeting sequence with TTCN PAM
uaccuagaggcugccagaag

SEQ ID NO: 22827 - RNA, 20 nt, Artificial Sequence
  targeting sequence with TTCN PAM
cuggcuccuggcauaggcac

SEQ ID NO: 22828 - RNA, 20 nt, Artificial Sequence
  targeting sequence with TTCN PAM
ucaacugcugacccauuucc

SEQ ID NO: 22829 - RNA, 20 nt, Artificial Sequence
  targeting sequence with TTCN PAM
aacagcagcuugacugaugu

SEQ ID NO: 22830 - RNA, 20 nt, Artificial Sequence
  targeting sequence with TTCN PAM
gugcuuuccaacagcagcuu

SEQ ID NO: 22831 - RNA, 20 nt, Artificial Sequence
  targeting sequence with TTCN PAM
ugcuggagagggcuaaaugc

SEQ ID NO: 22832 - RNA, 20 nt, Artificial Sequence
  targeting sequence with TTCN PAM
acagaggcauuuagcccucu

SEQ ID NO: 22833 - RNA, 20 nt, Artificial Sequence
  targeting sequence with TTCN PAM
uauaagccugucuuucaaca

SEQ ID NO: 22834 - RNA, 20 nt, Artificial Sequence
  targeting sequence with TTCN PAM
augcagcuuaggacauaacc

SEQ ID NO: 22835 - RNA, 20 nt, Artificial Sequence
  targeting sequence with TTCN PAM
cuuuuagagcuaauuggaga

SEQ ID NO: 22836 - RNA, 20 nt, Artificial Sequence
  targeting sequence with TTCN PAM
gagaaauggaauaauuacca

SEQ ID NO: 22837 - RNA, 20 nt, Artificial Sequence
  targeting sequence with TTCN PAM
cugaacuacucaaguugucu

SEQ ID NO: 22838 - RNA, 20 nt, Artificial Sequence
  targeting sequence with TTCN PAM
auuucucugaacuacucaag

SEQ ID NO: 22839 - RNA, 20 nt, Artificial Sequence
  targeting sequence with TTCN PAM
aagcuguacugccucuggag

SEQ ID NO: 22840 - RNA, 20 nt, Artificial Sequence
  targeting sequence with TTCN PAM
uccaagcuguacugccucug

SEQ ID NO: 22841 - RNA, 20 nt, Artificial Sequence
  targeting sequence with TTCN PAM
ugggcuuuggaaucagaccu

SEQ ID NO: 22842 - RNA, 20 nt, Artificial Sequence
  targeting sequence with TTCN PAM
aaagcccaagaaugucuuuc

SEQ ID NO: 22843 - RNA, 20 nt, Artificial Sequence
  targeting sequence with TTCN PAM
aacccaggucugauuccaaa

SEQ ID NO: 22844 - RNA, 20 nt, Artificial Sequence
  targeting sequence with TTCN PAM
aguuggugacuugggcaaau

SEQ ID NO: 22845 - RNA, 20 nt, Artificial Sequence
  targeting sequence with TTCN PAM
ucaucaguacugugaggaua

SEQ ID NO: 22846 - RNA, 20 nt, Artificial Sequence
  targeting sequence with TTCN PAM
gagugacaucaacaagagcg

SEQ ID NO: 22847 - RNA, 20 nt, Artificial Sequence
  targeting sequence with TTCN PAM
agagcugcugcugggccagg

SEQ ID NO: 22848 - RNA, 20 nt, Artificial Sequence
  targeting sequence with TTCN PAM
ucaagagcugcugcugggcc

SEQ ID NO: 22849 - RNA, 20 nt, Artificial Sequence
  targeting sequence with TTCN PAM
cucacugcaggaagauccgu

SEQ ID NO: 22850 - RNA, 20 nt, Artificial Sequence
  targeting sequence with TTCN PAM
ugcagugagagaaaagcaaa

SEQ ID NO: 22851 - RNA, 20 nt, Artificial Sequence
  targeting sequence with TTCN PAM
guguccaucguccugaaacu

SEQ ID NO: 22852 - RNA, 20 nt, Artificial Sequence
  targeting sequence with TTCN PAM
ggacgauggacacugaacgg

SEQ ID NO: 22853 - RNA, 20 nt, Artificial Sequence
  targeting sequence with TTCN PAM
acaucuccagguuccugcug

SEQ ID NO: 22854 - RNA, 20 nt, Artificial Sequence
  targeting sequence with TTCN PAM
ugcugcacagccugcccaag

SEQ ID NO: 22855 - RNA, 20 nt, Artificial Sequence
  targeting sequence with TTCN PAM
cuuaucccuccuccguccca

SEQ ID NO: 22856 - RNA, 20 nt, Artificial Sequence
  targeting sequence with TTCN PAM
ugucuaauggccccaagaaa

SEQ ID NO: 22857 - RNA, 20 nt, Artificial Sequence
  targeting sequence with TTCN PAM
uggggccauuagacaagaac

SEQ ID NO: 22858 - RNA, 20 nt, Artificial Sequence
  targeting sequence with TTCN PAM
uuccagagcacuuuccuggc

SEQ ID NO: 22859 - RNA, 20 nt, Artificial Sequence
  targeting sequence with TTCN PAM
agagcacuuuccuggcagaa

SEQ ID NO: 22860 - RNA, 20 nt, Artificial Sequence
  targeting sequence with TTCN PAM
uggcagaaccuuccucucuc

SEQ ID NO: 22861 - RNA, 20 nt, Artificial Sequence
  targeting sequence with TTCN PAM
gccaggaaagugcucuggaa

SEQ ID NO: 22862 - RNA, 20 nt, Artificial Sequence
  targeting sequence with TTCN PAM
ucucucagcaacccucaggg

SEQ ID NO: 22863 - RNA, 20 nt, Artificial Sequence
  targeting sequence with TTCN PAM
cugaggguugcugagagagg

SEQ ID NO: 22864 - RNA, 20 nt, Artificial Sequence
  targeting sequence with TTCN PAM
cugucuucccugaggguugc

SEQ ID NO: 22865 - RNA, 20 nt, Artificial Sequence
  targeting sequence with TTCN PAM
cuuggccugggccccugggc

SEQ ID NO: 22866 - RNA, 20 nt, Artificial Sequence
  targeting sequence with TTCN PAM
gggcucucugagcugaaccc

SEQ ID NO: 22867 - RNA, 20 nt, Artificial Sequence
  targeting sequence with TTCN PAM
gcucagagagcccugaaaac

SEQ ID NO: 22868 - RNA, 20 nt, Artificial Sequence
  targeting sequence with TTCN PAM
aggagggauugggacagugu

SEQ ID NO: 22869 - RNA, 20 nt, Artificial Sequence
  targeting sequence with TTCN PAM
gucacacccucaucuguggg

SEQ ID NO: 22870 - RNA, 20 nt, Artificial Sequence
  targeting sequence with TTCN PAM
auuucagucacacccucauc

SEQ ID NO: 22871 - RNA, 20 nt, Artificial Sequence
  targeting sequence with TTCN PAM
uccauuucagucacacccuc

SEQ ID NO: 22872 - RNA, 20 nt, Artificial Sequence
  targeting sequence with TTCN PAM
ggcuuggaaccuugggcacu

SEQ ID NO: 22873 - RNA, 20 nt, Artificial Sequence
  targeting sequence with TTCN PAM
aagccugaaggccuggugcu

SEQ ID NO: 22874 - RNA, 20 nt, Artificial Sequence
  targeting sequence with TTCN PAM
ccagacuggggaggagggag

SEQ ID NO: 22875 - RNA, 20 nt, Artificial Sequence
  targeting sequence with TTCN PAM
gcccagguauacauagcacc

SEQ ID NO: 22876 - RNA, 20 nt, Artificial Sequence
  targeting sequence with TTCN PAM
gugccccaagcccugggcca

SEQ ID NO: 22877 - RNA, 20 nt, Artificial Sequence
  targeting sequence with TTCN PAM
acccucagacacagcacaca

SEQ ID NO: 22878 - RNA, 20 nt, Artificial Sequence
  targeting sequence with TTCN PAM
uuccacccucagacacagca

SEQ ID NO: 22879 - RNA, 20 nt, Artificial Sequence
  targeting sequence with TTCN PAM
cugaccauggcccugaccuc

SEQ ID NO: 22880 - RNA, 20 nt, Artificial Sequence
  targeting sequence with TTCN PAM
cuggcugccucagcuugcau

SEQ ID NO: 22881 - RNA, 20 nt, Artificial Sequence
  targeting sequence with TTCN PAM
aggggaggacccagcauaug

SEQ ID NO: 22882 - RNA, 20 nt, Artificial Sequence
  targeting sequence with TTCN PAM
ucucuucuguagccaucgag

SEQ ID NO: 22883 - RNA, 20 nt, Artificial Sequence
  targeting sequence with TTCN PAM
guagccaucgagggccacag

SEQ ID NO: 22884 - RNA, 20 nt, Artificial Sequence
  targeting sequence with TTCN PAM
ggcaccugcucugcuuaugg

SEQ ID NO: 22885 - RNA, 20 nt, Artificial Sequence
  targeting sequence with TTCN PAM
uuucuaaaucucacuguacu

SEQ ID NO: 22886 - RNA, 20 nt, Artificial Sequence
  targeting sequence with TTCN PAM
aaaucucacuguacucucag

SEQ ID NO: 22887 - RNA, 20 nt, Artificial Sequence
  targeting sequence with TTCN PAM
cagccgcagccccaccuucc

SEQ ID NO: 22888 - RNA, 20 nt, Artificial Sequence
  targeting sequence with TTCN PAM
cucuguaaggaaaacccacu

SEQ ID NO: 22889 - RNA, 20 nt, Artificial Sequence
  targeting sequence with TTCN PAM
uuacagagggaagguggggc

SEQ ID NO: 22890 - RNA, 20 nt, Artificial Sequence
  targeting sequence with TTCN PAM
ccaguggaguggguuuuccu

SEQ ID NO: 22891 - RNA, 20 nt, Artificial Sequence
  targeting sequence with TTCN PAM
uacaacaaggagcucugggu

SEQ ID NO: 22892 - RNA, 20 nt, Artificial Sequence
  targeting sequence with TTCN PAM
aggcccauuauguacauuuc

SEQ ID NO: 22893 - RNA, 20 nt, Artificial Sequence
  targeting sequence with TTCN PAM
ggggaaauacccucaaauca

SEQ ID NO: 22894 - RNA, 20 nt, Artificial Sequence
  targeting sequence with TTCN PAM
ccugaaauguacauaauggg

SEQ ID NO: 22895 - RNA, 20 nt, Artificial Sequence
  targeting sequence with TTCN PAM
uggagucagaccucugcugc

SEQ ID NO: 22896 - RNA, 20 nt, Artificial Sequence
  targeting sequence with TTCN PAM
ccguaggagcagucagggcu

SEQ ID NO: 22897 - RNA, 20 nt, Artificial Sequence
  targeting sequence with TTCN PAM
agcaaguucuguuugaguca

SEQ ID NO: 22898 - RNA, 20 nt, Artificial Sequence
  targeting sequence with TTCN PAM
guuugagucaacagcuugau

SEQ ID NO: 22899 - RNA, 20 nt, Artificial Sequence
  targeting sequence with TTCN PAM
aucaagcuguugacucaaac

SEQ ID NO: 22900 - RNA, 20 nt, Artificial Sequence
  targeting sequence with TTCN PAM
agguccccaggggauggcac

SEQ ID NO: 22901 - RNA, 20 nt, Artificial Sequence
  targeting sequence with TTCN PAM
gugucuccagcaugacuccu

SEQ ID NO: 22902 - RNA, 20 nt, Artificial Sequence
  targeting sequence with TTCN PAM
uucugugucuccagcaugac

SEQ ID NO: 22903 - RNA, 20 nt, Artificial Sequence
  targeting sequence with TTCN PAM
guggagaguuuccuucugug

SEQ ID NO: 22904 - RNA, 20 nt, Artificial Sequence
  targeting sequence with TTCN PAM
gcaguucuguggagaguuuc

SEQ ID NO: 22905 - RNA, 20 nt, Artificial Sequence
  targeting sequence with TTCN PAM
ugcucccgccgucugcagug

SEQ ID NO: 22906 - RNA, 20 nt, Artificial Sequence
  targeting sequence with TTCN PAM
ucccgcaucucucccagugu

SEQ ID NO: 22907 - RNA, 20 nt, Artificial Sequence
  targeting sequence with TTCN PAM
agggggccccagagcacagg

SEQ ID NO: 22908 - RNA, 20 nt, Artificial Sequence
  targeting sequence with TTCN PAM
gagcggcagccugugcucug

SEQ ID NO: 22909 - RNA, 20 nt, Artificial Sequence
  targeting sequence with TTCN PAM
ccgagggccuggugggcagu

SEQ ID NO: 22910 - RNA, 20 nt, Artificial Sequence
  targeting sequence with TTCN PAM
ugccucaccaaaccugccag

SEQ ID NO: 22911 - RNA, 20 nt, Artificial Sequence
  targeting sequence with TTCN PAM
auuaauacuuuaaccuugcu

SEQ ID NO: 22912 - RNA, 20 nt, Artificial Sequence
  targeting sequence with TTCN PAM
aaagauaaaaacagcguagu

SEQ ID NO: 22913 - RNA, 20 nt, Artificial Sequence
  targeting sequence with TTCN PAM
ugggccuugccauccgagaa

SEQ ID NO: 22914 - RNA, 20 nt, Artificial Sequence
  targeting sequence with TTCN PAM
cggauggcaaggcccaggaa

SEQ ID NO: 22915 - RNA, 20 nt, Artificial Sequence
  targeting sequence with TTCN PAM
ucacggucuuuccucugccu

SEQ ID NO: 22916 - RNA, 20 nt, Artificial Sequence
  targeting sequence with TTCN PAM
ucugccuucccggcaccagc

SEQ ID NO: 22917 - RNA, 20 nt, Artificial Sequence
  targeting sequence with TTCN PAM
cggcaccagcacaagcugug

SEQ ID NO: 22918 - RNA, 20 nt, Artificial Sequence
  targeting sequence with TTCN PAM
agccuggggcucacuccaag

SEQ ID NO: 22919 - RNA, 20 nt, Artificial Sequence
  targeting sequence with TTCN PAM
cggcaggaaaauacucuuca

SEQ ID NO: 22920 - RNA, 20 nt, Artificial Sequence
  targeting sequence with TTCN PAM
ugccgugaacaggguuaagg

SEQ ID NO: 22921 - RNA, 20 nt, Artificial Sequence
  targeting sequence with TTCN PAM
ccuuggccaagcagagcaag

SEQ ID NO: 22922 - RNA, 20 nt, Artificial Sequence
  targeting sequence with TTCN PAM
aaaaguccauugagcugggu

SEQ ID NO: 22923 - RNA, 20 nt, Artificial Sequence
  targeting sequence with TTCN PAM
acgacagugaggugaggaug

SEQ ID NO: 22924 - RNA, 20 nt, Artificial Sequence
  targeting sequence with TTCN PAM
ccucucccuugaggccaucu

SEQ ID NO: 22925 - RNA, 20 nt, Artificial Sequence
  targeting sequence with TTCN PAM
ugccuggccuggguuccguu

SEQ ID NO: 22926 - RNA, 20 nt, Artificial Sequence
  targeting sequence with TTCN PAM
guuugaagagagacagcugc

SEQ ID NO: 22927 - RNA, 20 nt, Artificial Sequence
  targeting sequence with TTCN PAM
aacggaacccaggccaggca

SEQ ID NO: 22928 - RNA, 20 nt, Artificial Sequence
  targeting sequence with TTCN PAM
cuguccaccuccuguucucc

SEQ ID NO: 22929 - RNA, 20 nt, Artificial Sequence
  targeting sequence with TTCN PAM
ccccgcaguccaccuggcgc

SEQ ID NO: 22930 - RNA, 20 nt, Artificial Sequence
  targeting sequence with TTCN PAM
agaguaagagucagcucugg

SEQ ID NO: 22931 - RNA, 20 nt, Artificial Sequence
  targeting sequence with TTCN PAM
ggaaccaggcuguaguucuc

SEQ ID NO: 22932 - RNA, 20 nt, Artificial Sequence
  targeting sequence with TTCN PAM
agaaagggcagagguuucua

SEQ ID NO: 22933 - RNA, 20 nt, Artificial Sequence
  targeting sequence with TTCN PAM
ccagcaaaucuaccccacac

SEQ ID NO: 22934 - RNA, 20 nt, Artificial Sequence
  targeting sequence with TTCN PAM
uucaacccagccagcuuccu

SEQ ID NO: 22935 - RNA, 20 nt, Artificial Sequence
  targeting sequence with TTCN PAM
acccagccagcuuccuucuu

SEQ ID NO: 22936 - RNA, 20 nt, Artificial Sequence
  targeting sequence with TTCN PAM
uucuuucacacauccucccu

SEQ ID NO: 22937 - RNA, 20 nt, Artificial Sequence
  targeting sequence with TTCN PAM
uucacacauccucccucaag

SEQ ID NO: 22938 - RNA, 20 nt, Artificial Sequence
  targeting sequence with TTCN PAM
cacauccucccucaagcuca

SEQ ID NO: 22939 - RNA, 20 nt, Artificial Sequence
  targeting sequence with TTCN PAM
gacagaccuggguucacauc

SEQ ID NO: 22940 - RNA, 20 nt, Artificial Sequence
  targeting sequence with TTCN PAM
caucccggcuccacccucuc

SEQ ID NO: 22941 - RNA, 20 nt, Artificial Sequence
  targeting sequence with TTCN PAM
gcaccuuggguucccccuuu

SEQ ID NO: 22942 - RNA, 20 nt, Artificial Sequence
  targeting sequence with TTCN PAM
cccuuucccacagguaguug

SEQ ID NO: 22943 - RNA, 20 nt, Artificial Sequence
  targeting sequence with TTCN PAM
cacagguaguugugaggcua

SEQ ID NO: 22944 - RNA, 20 nt, Artificial Sequence
  targeting sequence with TTCN PAM
ugccaggggaaaagugccgu

SEQ ID NO: 22945 - RNA, 20 nt, Artificial Sequence
  targeting sequence with TTCN PAM
ccuggcaggaaugacagugg

SEQ ID NO: 22946 - RNA, 20 nt, Artificial Sequence
  targeting sequence with TTCN PAM
gcaggccuuuauccugcuuc

SEQ ID NO: 22947 - RNA, 20 nt, Artificial Sequence
  targeting sequence with TTCN PAM
ccauggcauggagcuccugg

SEQ ID NO: 22948 - RNA, 20 nt, Artificial Sequence
  targeting sequence with TTCN PAM
cugccugcccacccgggugg

SEQ ID NO: 22949 - RNA, 20 nt, Artificial Sequence
  targeting sequence with TTCN PAM
ucuuggcagccaggccccag

SEQ ID NO: 22950 - RNA, 20 nt, Artificial Sequence
  targeting sequence with TTCN PAM
ggccccuggggccuggcugc

SEQ ID NO: 22951 - RNA, 20 nt, Artificial Sequence
  targeting sequence with TTCN PAM
ucuucuccgccucuuccuac

SEQ ID NO: 22952 - RNA, 20 nt, Artificial Sequence
  targeting sequence with TTCN PAM
ccgccucuuccuacggugag

SEQ ID NO: 22953 - RNA, 20 nt, Artificial Sequence
  targeting sequence with TTCN PAM
uacggugagucccugcaucc

SEQ ID NO: 22954 - RNA, 20 nt, Artificial Sequence
  targeting sequence with TTCN PAM
gaggccuuuggcccuugccc

SEQ ID NO: 22955 - RNA, 20 nt, Artificial Sequence
  targeting sequence with TTCN PAM
uaaacagggacauucagagg

SEQ ID NO: 22956 - RNA, 20 nt, Artificial Sequence
  targeting sequence with TTCN PAM
cagagauaggacccacugcu

SEQ ID NO: 22957 - RNA, 20 nt, Artificial Sequence
  targeting sequence with TTCN PAM
gcuuugggcagcaguggguc

SEQ ID NO: 22958 - RNA, 20 nt, Artificial Sequence
  targeting sequence with TTCN PAM
cagagugggugcuucagcuu

SEQ ID NO: 22959 - RNA, 20 nt, Artificial Sequence
  targeting sequence with TTCN PAM
ggggcauuugguuauguaaa

SEQ ID NO: 22960 - RNA, 20 nt, Artificial Sequence
  targeting sequence with TTCN PAM
gaccaggaggcugagauagg

SEQ ID NO: 22961 - RNA, 20 nt, Artificial Sequence
  targeting sequence with TTCN PAM
gauccucugucaacaucaaa

SEQ ID NO: 22962 - RNA, 20 nt, Artificial Sequence
  targeting sequence with TTCN PAM
caggagcugagcagaggcca

SEQ ID NO: 22963 - RNA, 20 nt, Artificial Sequence
  targeting sequence with TTCN PAM
guaugugugugugugcaggg

SEQ ID NO: 22964 - RNA, 20 nt, Artificial Sequence
  targeting sequence with TTCN PAM
gggacagucugugugugugu

SEQ ID NO: 22965 - RNA, 20 nt, Artificial Sequence
  targeting sequence with TTCN PAM
gugugugugugugcaggggc

SEQ ID NO: 22966 - RNA, 20 nt, Artificial Sequence
  targeting sequence with TTCN PAM
guguguguguguaggggcag

SEQ ID NO: 22967 - RNA, 20 nt, Artificial Sequence
  targeting sequence with TTCN PAM
gugugugugugugugcaggg

SEQ ID NO: 22968 - RNA, 20 nt, Artificial Sequence
  targeting sequence with TTCN PAM
gugugugugugugugcaggg

SEQ ID NO: 22969 - RNA, 20 nt, Artificial Sequence
  targeting sequence with TTCN PAM
ugcuuuuggugaagcugcca

SEQ ID NO: 22970 - RNA, 20 nt, Artificial Sequence
  targeting sequence with TTCN PAM
ccaaaagcaagaagaggcag

SEQ ID NO: 22971 - RNA, 20 nt, Artificial Sequence
  targeting sequence with TTCN PAM
caacccacuggcagcuucac

SEQ ID NO: 22972 - RNA, 20 nt, Artificial Sequence
  targeting sequence with TTCN PAM
cuaugcccuccagacgugcu

SEQ ID NO: 22973 - RNA, 20 nt, Artificial Sequence
  targeting sequence with TTCN PAM
accuggaggaagggaucacu

SEQ ID NO: 22974 - RNA, 20 nt, Artificial Sequence
  targeting sequence with TTCN PAM
uccagguagaacucaaccag

SEQ ID NO: 22975 - RNA, 20 nt, Artificial Sequence
  targeting sequence with TTCN PAM
ucagugaucccuuccuccag

SEQ ID NO: 22976 - RNA, 20 nt, Artificial Sequence
  targeting sequence with TTCN PAM
ucaucagugaucccuuccuc

SEQ ID NO: 22977 - RNA, 20 nt, Artificial Sequence
  targeting sequence with TTCN PAM
cgccuguccccagaccccuc

SEQ ID NO: 22978 - RNA, 20 nt, Artificial Sequence
  targeting sequence with TTCN PAM
cagagagauuggagaggccc

SEQ ID NO: 22979 - RNA, 20 nt, Artificial Sequence
  targeting sequence with TTCN PAM
ggguccuuaggcccuggcca

SEQ ID NO: 22980 - RNA, 20 nt, Artificial Sequence
  targeting sequence with TTCN PAM
cgugugggucucccacccuc

SEQ ID NO: 22981 - RNA, 20 nt, Artificial Sequence
  targeting sequence with TTCN PAM
acucaagucacuuucgcaug

SEQ ID NO: 22982 - RNA, 20 nt, Artificial Sequence
  targeting sequence with TTCN PAM
caugcaagugacagagucca

SEQ ID NO: 22983 - RNA, 20 nt, Artificial Sequence
  targeting sequence with TTCN PAM
gcuugucaguuuuggacucu

SEQ ID NO: 22984 - RNA, 20 nt, Artificial Sequence
  targeting sequence with TTCN PAM
uugcacacccuuugcuuguu

SEQ ID NO: 22985 - RNA, 20 nt, Artificial Sequence
  targeting sequence with TTCN PAM
ucuccugcuuggggcuuccu

SEQ ID NO: 22986 - RNA, 20 nt, Artificial Sequence
  targeting sequence with TTCN PAM
uggcccagcgcucagucugg

SEQ ID NO: 22987 - RNA, 20 nt, Artificial Sequence
  targeting sequence with TTCN PAM
uucuuuggcagccccguggu

SEQ ID NO: 22988 - RNA, 20 nt, Artificial Sequence
  targeting sequence with TTCN PAM
uuggcagccccguggugccc

SEQ ID NO: 22989 - RNA, 20 nt, Artificial Sequence
  targeting sequence with TTCN PAM
gggggcuauaaggcugaggg

SEQ ID NO: 22990 - RNA, 20 nt, Artificial Sequence
  targeting sequence with TTCN PAM
ucucagcuguggcagugaaa

SEQ ID NO: 22991 - RNA, 20 nt, Artificial Sequence
  targeting sequence with TTCN PAM
cugccacagcugagaggaaa

SEQ ID NO: 22992 - RNA, 20 nt, Artificial Sequence
  targeting sequence with TTCN PAM
ggcagggaacagcacacacg

SEQ ID NO: 22993 - RNA, 20 nt, Artificial Sequence
  targeting sequence with TTCN PAM
cugccagaagccccucccau

SEQ ID NO: 22994 - RNA, 20 nt, Artificial Sequence
  targeting sequence with TTCN PAM
uugcagcucccaggugcugc

SEQ ID NO: 22995 - RNA, 20 nt, Artificial Sequence
  targeting sequence with TTCN PAM
cuccucccaguguggccccu

SEQ ID NO: 22996 - RNA, 20 nt, Artificial Sequence
  targeting sequence with TTCN PAM
gcaagcagcucucugagcuu

SEQ ID NO: 22997 - RNA, 20 nt, Artificial Sequence
  targeting sequence with TTCN PAM
uucagcaagcagcucucuga

SEQ ID NO: 22998 - RNA, 20 nt, Artificial Sequence
  targeting sequence with TTCN PAM
agggaccuccaggugagucu

SEQ ID NO: 22999 - RNA, 20 nt, Artificial Sequence
  targeting sequence with TTCN PAM
guggcugcugggggucugcg

SEQ ID NO: 23000 - RNA, 20 nt, Artificial Sequence
  targeting sequence with TTCN PAM
ccaggaucccugggcccauc

SEQ ID NO: 23001 - RNA, 20 nt, Artificial Sequence
  targeting sequence with TTCN PAM
cacuggcccugggagcuaug

SEQ ID NO: 23002 - RNA, 20 nt, Artificial Sequence
  targeting sequence with TTCN PAM
ccucgcaggccacacacacc

SEQ ID NO: 23003 - RNA, 20 nt, Artificial Sequence
  targeting sequence with TTCN PAM
uucugauuccuuggccugag

SEQ ID NO: 23004 - RNA, 20 nt, Artificial Sequence
  targeting sequence with TTCN PAM
gauuccuuggccugagcccc

SEQ ID NO: 23005 - RNA, 20 nt, Artificial Sequence
  targeting sequence with TTCN PAM
uuggccugagcccccucugu

SEQ ID NO: 23006 - RNA, 20 nt, Artificial Sequence
  targeting sequence with TTCN PAM
uccaccuggaaaacucuucc

SEQ ID NO: 23007 - RNA, 20 nt, Artificial Sequence
  targeting sequence with TTCN PAM
agguggaggaacagaggggg

SEQ ID NO: 23008 - RNA, 20 nt, Artificial Sequence
  targeting sequence with TTCN PAM
acuggucuggcugcccuuga

SEQ ID NO: 23009 - RNA, 20 nt, Artificial Sequence
  targeting sequence with TTCN PAM
cacagggguguaggguggag

SEQ ID NO: 23010 - RNA, 20 nt, Artificial Sequence
  targeting sequence with TTCN PAM
gauuccauccuugaccagau

SEQ ID NO: 23011 - RNA, 20 nt, Artificial Sequence
  targeting sequence with TTCN PAM
auccuugaccagaucccucc

SEQ ID NO: 23012 - RNA, 20 nt, Artificial Sequence
  targeting sequence with TTCN PAM
gcggcuaguggagaccaagg

SEQ ID NO: 23013 - RNA, 20 nt, Artificial Sequence
  targeting sequence with TTCN PAM
cagcuaagcugagcuuugag

SEQ ID NO: 23014 - RNA, 20 nt, Artificial Sequence
  targeting sequence with TTCN PAM
ccugugcacauggggacccu

SEQ ID NO: 23015 - RNA, 20 nt, Artificial Sequence
  targeting sequence with TTCN PAM
ggccaauccuccuccaccac

SEQ ID NO: 23016 - RNA, 20 nt, Artificial Sequence
  targeting sequence with TTCN PAM
agaugugguggcacgaagga

SEQ ID NO: 23017 - RNA, 20 nt, Artificial Sequence
  targeting sequence with TTCN PAM
ugccaccacaucuggaaguu

SEQ ID NO: 23018 - RNA, 20 nt, Artificial Sequence
  targeting sequence with TTCN PAM
uguggggugugggagccaug

SEQ ID NO: 23019 - RNA, 20 nt, Artificial Sequence
  targeting sequence with TTCN PAM
gcucuggugggaggagcuug

SEQ ID NO: 23020 - RNA, 20 nt, Artificial Sequence
  targeting sequence with TTCN PAM
uaaacccaggugacccuaac

SEQ ID NO: 23021 - RNA, 20 nt, Artificial Sequence
  targeting sequence with TTCN PAM
aggaucauaauccacacaga

SEQ ID NO: 23022 - RNA, 20 nt, Artificial Sequence
  targeting sequence with TTCN PAM
cgcccacccugcagcaaggu

SEQ ID NO: 23023 - RNA, 20 nt, Artificial Sequence
  targeting sequence with TTCN PAM
ugccagugguggugagccgg

SEQ ID NO: 23024 - RNA, 20 nt, Artificial Sequence
  targeting sequence with TTCN PAM
gcucacugcugccugacgcc

SEQ ID NO: 23025 - RNA, 20 nt, Artificial Sequence
  targeting sequence with TTCN PAM
agguagguggccacccuggu

SEQ ID NO: 23026 - RNA, 20 nt, Artificial Sequence
  targeting sequence with TTCN PAM
cuuggccacuuuucccuugc

SEQ ID NO: 23027 - RNA, 20 nt, Artificial Sequence
  targeting sequence with TTCN PAM
cuugcccaaaugucccucug

SEQ ID NO: 23028 - RNA, 20 nt, Artificial Sequence
  targeting sequence with TTCN PAM
augugcaucuaaaguggacu

SEQ ID NO: 23029 - RNA, 20 nt, Artificial Sequence
  targeting sequence with TTCN PAM
cuggccccugcgcuguccac

SEQ ID NO: 23030 - RNA, 20 nt, Artificial Sequence
  targeting sequence with TTCN PAM
cucagaaaacaagaaacccc

SEQ ID NO: 23031 - RNA, 20 nt, Artificial Sequence
  targeting sequence with TTCN PAM
gagugaaggucaagggcaca

SEQ ID NO: 23032 - RNA, 20 nt, Artificial Sequence
  targeting sequence with TTCN PAM
uguuuucugagugaagguca

SEQ ID NO: 23033 - RNA, 20 nt, Artificial Sequence
  targeting sequence with TTCN PAM
agcccucaaacaaaggugcu

SEQ ID NO: 23034 - RNA, 20 nt, Artificial Sequence
  targeting sequence with TTCN PAM
gccuggucuuacagcugucu

SEQ ID NO: 23035 - RNA, 20 nt, Artificial Sequence
  targeting sequence with TTCN PAM
cuuagauguuccauucugag

SEQ ID NO: 23036 - RNA, 20 nt, Artificial Sequence
  targeting sequence with TTCN PAM
auucugaggacuaugaguug

SEQ ID NO: 23037 - RNA, 20 nt, Artificial Sequence
  targeting sequence with TTCN PAM
gaggacuaugaguugcuggu

SEQ ID NO: 23038 - RNA, 20 nt, Artificial Sequence
  targeting sequence with TTCN PAM
gcauggcugcugccccuacu

SEQ ID NO: 23039 - RNA, 20 nt, Artificial Sequence
  targeting sequence with TTCN PAM
cagcccagcagaccccaagg

SEQ ID NO: 23040 - RNA, 20 nt, Artificial Sequence
  targeting sequence with TTCN PAM
ccuucacagcccagcagacc

SEQ ID NO: 23041 - RNA, 20 nt, Artificial Sequence
  targeting sequence with TTCN PAM
gacaguuuaacucuuuauuc

SEQ ID NO: 23042 - RNA, 20 nt, Artificial Sequence
  targeting sequence with TTCN PAM
ugcccagaugaaguuugugu

SEQ ID NO: 23043 - RNA, 20 nt, Artificial Sequence
  targeting sequence with TTCN PAM
ucugggcaagaaacacauuc

SEQ ID NO: 23044 - RNA, 20 nt, Artificial Sequence
  targeting sequence with TTCN PAM
gugguuacacaaggcccccc

SEQ ID NO: 23045 - RNA, 20 nt, Artificial Sequence
  targeting sequence with TTCN PAM
uauuuauggcauuucaugcc

SEQ ID NO: 23046 - RNA, 20 nt, Artificial Sequence
  targeting sequence with TTCN PAM
ugccuuguaaauagcaccag

SEQ ID NO: 23047 - RNA, 20 nt, Artificial Sequence
  targeting sequence with TTCN PAM
ucaucuccuggugcuauuua

SEQ ID NO: 23048 - RNA, 20 nt, Artificial Sequence
  targeting sequence with TTCN PAM
cuuccucaucuccuggugcu

SEQ ID NO: 23049 - RNA, 20 nt, Artificial Sequence
  targeting sequence with TTCN PAM
aaggaaaaaaaucuguuacu

SEQ ID NO: 23050 - RNA, 20 nt, Artificial Sequence
  targeting sequence with TTCN PAM
uuagaaaauauauguacauu

SEQ ID NO: 23051 - RNA, 20 nt, Artificial Sequence
  targeting sequence with TTCN PAM
gaacggcuccgaguuguucg

SEQ ID NO: 23052 - RNA, 20 nt, Artificial Sequence
  targeting sequence with TTCN PAM
gaaaguaacagauuuuuuuc

SEQ ID NO: 23053 - RNA, 20 nt, Artificial Sequence
  targeting sequence with TTCN PAM
uggcagccugcuggaguccg

SEQ ID NO: 23054 - RNA, 20 nt, Artificial Sequence
  targeting sequence with TTCN PAM
ucagcaucuacauuuuagca

SEQ ID NO: 23055 - RNA, 20 nt, Artificial Sequence
  targeting sequence with TTCN PAM
guaugcaaaagugcaccugu

SEQ ID NO: 23056 - RNA, 20 nt, Artificial Sequence
  targeting sequence with TTCN PAM
aauuugaaaggaacauuaca

SEQ ID NO: 23057 - RNA, 20 nt, Artificial Sequence
  targeting sequence with TTCN PAM
aauuagaaacaggugcacuu

SEQ ID NO: 23058 - RNA, 20 nt, Artificial Sequence
  targeting sequence with TTCN PAM
uuucaaauuagaaacaggug

SEQ ID NO: 23059 - RNA, 20 nt, Artificial Sequence
  targeting sequence with TTCN PAM
auauugccauuuugauuaaa

SEQ ID NO: 23060 - RNA, 20 nt, Artificial Sequence
  targeting sequence with TTCN PAM
cuugucaagauggaucccca

SEQ ID NO: 23061 - RNA, 20 nt, Artificial Sequence
  targeting sequence with TTCN PAM
uuggacccacguauuuucuc

SEQ ID NO: 23062 - RNA, 20 nt, Artificial Sequence
  targeting sequence with TTCN PAM
auccaccuuccccagcccca

SEQ ID NO: 23063 - RNA, 20 nt, Artificial Sequence
  targeting sequence with TTCN PAM
ccagccccacagagcagccc

SEQ ID NO: 23064 - RNA, 20 nt, Artificial Sequence
  targeting sequence with TTCN PAM
cuuuggaacagcuccuuaag

SEQ ID NO: 23065 - RNA, 20 nt, Artificial Sequence
  targeting sequence with TTCN PAM
aaagggaagagucuccauug

SEQ ID NO: 23066 - RNA, 20 nt, Artificial Sequence
  targeting sequence with TTCN PAM
guuugagauuccagacugcc

SEQ ID NO: 23067 - RNA, 20 nt, Artificial Sequence
  targeting sequence with TTCN PAM
agacugccaaggucuguucc

SEQ ID NO: 23068 - RNA, 20 nt, Artificial Sequence
  targeting sequence with TTCN PAM
cucaggcaucacuggugucc

SEQ ID NO: 23069 - RNA, 20 nt, Artificial Sequence
  targeting sequence with TTCN PAM
augcccucaagcuguuggac

SEQ ID NO: 23070 - RNA, 20 nt, Artificial Sequence
  targeting sequence with TTCN PAM
uuccaugcccucaagcuguu

SEQ ID NO: 23071 - RNA, 20 nt, Artificial Sequence
  targeting sequence with TTCN PAM
gugugcuguuccuuccaugc

SEQ ID NO: 23072 - RNA, 20 nt, Artificial Sequence
  targeting sequence with TTCN PAM
ccuuagcuucugugugcugu

SEQ ID NO: 23073 - RNA, 20 nt, Artificial Sequence
  targeting sequence with TTCN PAM
augcugucucaggccucuca

SEQ ID NO: 23074 - RNA, 20 nt, Artificial Sequence
  targeting sequence with TTCN PAM
cagggcugcugagaggccug

SEQ ID NO: 23075 - RNA, 20 nt, Artificial Sequence
  targeting sequence with TTCN PAM
uucacagggcugcugagagg

SEQ ID NO: 23076 - RNA, 20 nt, Artificial Sequence
  targeting sequence with TTCN PAM
aguggggcugggaagggggu

SEQ ID NO: 23077 - RNA, 20 nt, Artificial Sequence
  targeting sequence with TTCN PAM
cagccccacuggaaaucaua

SEQ ID NO: 23078 - RNA, 20 nt, Artificial Sequence
  targeting sequence with TTCN PAM
cccccaguccaccugccaga

SEQ ID NO: 23079 - RNA, 20 nt, Artificial Sequence
  targeting sequence with TTCN PAM
ugaaaagcccaagaacagcu

SEQ ID NO: 23080 - RNA, 20 nt, Artificial Sequence
  targeting sequence with TTCN PAM
ugaagugcugcauugccacc

SEQ ID NO: 23081 - RNA, 20 nt, Artificial Sequence
  targeting sequence with TTCN PAM
ugggcuuuucaugaagugcu

SEQ ID NO: 23082 - RNA, 20 nt, Artificial Sequence
  targeting sequence with TTCN PAM
gcauggcaugacagcccaca

SEQ ID NO: 23083 - RNA, 20 nt, Artificial Sequence
  targeting sequence with TTCN PAM
uuacaaccuaccugugcagg

SEQ ID NO: 23084 - RNA, 20 nt, Artificial Sequence
  targeting sequence with TTCN PAM
cacugggggccucugcagcc

SEQ ID NO: 23085 - RNA, 20 nt, Artificial Sequence
  targeting sequence with TTCN PAM
uccaucaucuccagagagau

SEQ ID NO: 23086 - RNA, 20 nt, Artificial Sequence
  targeting sequence with TTCN PAM
uuauuuuccuccaucaucuc

SEQ ID NO: 23087 - RNA, 20 nt, Artificial Sequence
  targeting sequence with TTCN PAM
guuggcacaacugucuggcu

SEQ ID NO: 23088 - RNA, 20 nt, Artificial Sequence
  targeting sequence with TTCN PAM
auuagcgcaugacuucaacu

SEQ ID NO: 23089 - RNA, 20 nt, Artificial Sequence
  targeting sequence with TTCN PAM
acugaaaucauuugcauaug

SEQ ID NO: 23090 - RNA, 20 nt, Artificial Sequence
  targeting sequence with TTCN PAM
guugaagucaugcgcuaaug

SEQ ID NO: 23091 - RNA, 20 nt, Artificial Sequence
  targeting sequence with TTCN PAM
cagccauaugcaaaugauuu

SEQ ID NO: 23092 - RNA, 20 nt, Artificial Sequence
  targeting sequence with TTCN PAM
cccucuccccuuuuucccag

SEQ ID NO: 23093 - RNA, 20 nt, Artificial Sequence
  targeting sequence with TTCN PAM
agccgagacuccagcaugca

SEQ ID NO: 23094 - RNA, 20 nt, Artificial Sequence
  targeting sequence with TTCN PAM
gcugaggggaugcaugcugg

SEQ ID NO: 23095 - RNA, 20 nt, Artificial Sequence
  targeting sequence with TTCN PAM
ucggcugaggggaugcaugc

SEQ ID NO: 23096 - RNA, 20 nt, Artificial Sequence
  targeting sequence with TTCN PAM
uggggcagcagagcccggca

SEQ ID NO: 23097 - RNA, 20 nt, Artificial Sequence
  targeting sequence with TTCN PAM
uucagaugcacuuuccgugc

SEQ ID NO: 23098 - RNA, 20 nt, Artificial Sequence
  targeting sequence with TTCN PAM
gaugcacuuuccgugcauca

SEQ ID NO: 23099 - RNA, 20 nt, Artificial Sequence
  targeting sequence with TTCN PAM
gugcaucauccaaggcugcc

SEQ ID NO: 23100 - RNA, 20 nt, Artificial Sequence
  targeting sequence with TTCN PAM
uucagcaaauaugcauuaag

SEQ ID NO: 23101 - RNA, 20 nt, Artificial Sequence
  targeting sequence with TTCN PAM
gcaaauaugcauuaagccaa

SEQ ID NO: 23102 - RNA, 20 nt, Artificial Sequence
  targeting sequence with TTCN PAM
cucucagccugaucuggguc

SEQ ID NO: 23103 - RNA, 20 nt, Artificial Sequence
  targeting sequence with TTCN PAM
gacccagaucaggcugagag

SEQ ID NO: 23104 - RNA, 20 nt, Artificial Sequence
  targeting sequence with TTCN PAM
ccaaggcuguuuccccaucu

SEQ ID NO: 23105 - RNA, 20 nt, Artificial Sequence
  targeting sequence with TTCN PAM
ccaucugcacaaaagggccc

SEQ ID NO: 23106 - RNA, 20 nt, Artificial Sequence
  targeting sequence with TTCN PAM
agccucagucugcgucugug

SEQ ID NO: 23107 - RNA, 20 nt, Artificial Sequence
  targeting sequence with TTCN PAM
cagacgcagacugaggcugg

SEQ ID NO: 23108 - RNA, 20 nt, Artificial Sequence
  targeting sequence with TTCN PAM
uugucacaggcacuugaggg

SEQ ID NO: 23109 - RNA, 20 nt, Artificial Sequence
  targeting sequence with TTCN PAM
augggcaucaccaggucccu

SEQ ID NO: 23110 - RNA, 20 nt, Artificial Sequence
  targeting sequence with TTCN PAM
gcagcugcuccucucuggcc

SEQ ID NO: 23111 - RNA, 20 nt, Artificial Sequence
  targeting sequence with TTCN PAM
ggccuuuagccuguaguccc

SEQ ID NO: 23112 - RNA, 20 nt, Artificial Sequence
  targeting sequence with TTCN PAM
accucagccuccugaguagu

SEQ ID NO: 23113 - RNA, 20 nt, Artificial Sequence
  targeting sequence with TTCN PAM
uguccuuggcucaauugauc

SEQ ID NO: 23114 - RNA, 20 nt, Artificial Sequence
  targeting sequence with TTCN PAM
aggcugcaguaagcuaugau

SEQ ID NO: 23115 - RNA, 20 nt, Artificial Sequence
  targeting sequence with TTCN PAM
ucucuaaacaacauuuaaaa

SEQ ID NO: 23116 - RNA, 20 nt, Artificial Sequence
  targeting sequence with TTCN PAM
uaaaacaauuuuuaaauguu

SEQ ID NO: 23117 - RNA, 20 nt, Artificial Sequence
  targeting sequence with TTCN PAM
guuuuuacacagccauuacg

SEQ ID NO: 23118 - RNA, 20 nt, Artificial Sequence
  targeting sequence with TTCN PAM
uggaaggaggaaguaaggga

SEQ ID NO: 23119 - RNA, 20 nt, Artificial Sequence
  targeting sequence with TTCN PAM
aagaacaugggcacaauguu

SEQ ID NO: 23120 - RNA, 20 nt, Artificial Sequence
  targeting sequence with TTCN PAM
uccuuccaagaacaugggca

SEQ ID NO: 23121 - RNA, 20 nt, Artificial Sequence
  targeting sequence with TTCN PAM
caucuguccccagcaaggcu

SEQ ID NO: 23122 - RNA, 20 nt, Artificial Sequence
  targeting sequence with TTCN PAM
cagccuugcuggggacagau

SEQ ID NO: 23123 - RNA, 20 nt, Artificial Sequence
  targeting sequence with TTCN PAM
cuggcuuggagucugugugc

SEQ ID NO: 23124 - RNA, 20 nt, Artificial Sequence
  targeting sequence with TTCN PAM
cccccugcagauccagaaca

SEQ ID NO: 23125 - RNA, 20 nt, Artificial Sequence
  targeting sequence with TTCN PAM
ggaucugcagggggagaauc

SEQ ID NO: 23126 - RNA, 20 nt, Artificial Sequence
  targeting sequence with TTCN PAM
gccaacacccagaccccuag

SEQ ID NO: 23127 - RNA, 20 nt, Artificial Sequence
  targeting sequence with TTCN PAM
cccagucccagugcuguggg

SEQ ID NO: 23128 - RNA, 20 nt, Artificial Sequence
  targeting sequence with TTCN PAM
gaucaguacccccugagacu

SEQ ID NO: 23129 - RNA, 20 nt, Artificial Sequence
  targeting sequence with TTCN PAM
aggggcucccagucucaggg

SEQ ID NO: 23130 - RNA, 20 nt, Artificial Sequence
  targeting sequence with TTCN PAM
ugcuuucaaggggcucccag

SEQ ID NO: 23131 - RNA, 20 nt, Artificial Sequence
  targeting sequence with TTCN PAM
acccuagcauuugccaaacu

SEQ ID NO: 23132 - RNA, 20 nt, Artificial Sequence
  targeting sequence with TTCN PAM
cuuuucuacccuagcauuug

SEQ ID NO: 23133 - RNA, 20 nt, Artificial Sequence
  targeting sequence with TTCN PAM
ucuuucucuuuucuacccua

SEQ ID NO: 23134 - RNA, 20 nt, Artificial Sequence
  targeting sequence with TTCN PAM
cuccuuccucuuucucuuuu

SEQ ID NO: 23135 - RNA, 20 nt, Artificial Sequence
  targeting sequence with TTCN PAM
cccucccuuauucccccuug

SEQ ID NO: 23136 - RNA, 20 nt, Artificial Sequence
  targeting sequence with TTCN PAM
cccuugaugcucucaguacc

SEQ ID NO: 23137 - RNA, 20 nt, Artificial Sequence
  targeting sequence with TTCN PAM
gcgguacugagagcaucaag

SEQ ID NO: 23138 - RNA, 20 nt, Artificial Sequence
  targeting sequence with TTCN PAM
ccuggucccccacauggcuc

SEQ ID NO: 23139 - RNA, 20 nt, Artificial Sequence
  targeting sequence with TTCN PAM
uucuccuggucccccacaug

SEQ ID NO: 23140 - RNA, 20 nt, Artificial Sequence
  targeting sequence with TTCN PAM
uuggcuuucuuucuccuggu

SEQ ID NO: 23141 - RNA, 20 nt, Artificial Sequence
  targeting sequence with TTCN PAM
ccuccuccuccuccucuucc

SEQ ID NO: 23142 - RNA, 20 nt, Artificial Sequence
  targeting sequence with TTCN PAM
ccuccuucuccuccuccucc

SEQ ID NO: 23143 - RNA, 20 nt, Artificial Sequence
  targeting sequence with TTCN PAM
gccucugcaagagaggagcu

SEQ ID NO: 23144 - RNA, 20 nt, Artificial Sequence
  targeting sequence with TTCN PAM
aagccaagauggcuggaugc

SEQ ID NO: 23145 - RNA, 20 nt, Artificial Sequence
  targeting sequence with TTCN PAM
cuggacugcccgacacaagg

SEQ ID NO: 23146 - RNA, 20 nt, Artificial Sequence
  targeting sequence with TTCN PAM
aaucccagcucugcagagga

SEQ ID NO: 23147 - RNA, 20 nt, Artificial Sequence
  targeting sequence with TTCN PAM
ucugcagagcugggauuuga

SEQ ID NO: 23148 - RNA, 20 nt, Artificial Sequence
  targeting sequence with TTCN PAM
ucaguggucaguggggaguu

SEQ ID NO: 23149 - RNA, 20 nt, Artificial Sequence
  targeting sequence with TTCN PAM
uagggggcaggaggaguugu

SEQ ID NO: 23150 - RNA, 20 nt, Artificial Sequence
  targeting sequence with TTCN PAM
uucauucaacaaauguuuau

SEQ ID NO: 23151 - RNA, 20 nt, Artificial Sequence
  targeting sequence with TTCN PAM
uucaacaaauguuuauugaa

SEQ ID NO: 23152 - RNA, 20 nt, Artificial Sequence
  targeting sequence with TTCN PAM
acaaauguuuauugaacacc

SEQ ID NO: 23153 - RNA, 20 nt, Artificial Sequence
  targeting sequence with TTCN PAM
auaaacauuuguugaaugaa

SEQ ID NO: 23154 - RNA, 20 nt, Artificial Sequence
  targeting sequence with TTCN PAM
ucgcugccucugagcucaca

SEQ ID NO: 23155 - RNA, 20 nt, Artificial Sequence
  targeting sequence with TTCN PAM
agaaauagaugggaagucag

SEQ ID NO: 23156 - RNA, 20 nt, Artificial Sequence
  targeting sequence with TTCN PAM
agaaugcaggaccagccugg

SEQ ID NO: 23157 - RNA, 20 nt, Artificial Sequence
  targeting sequence with TTCN PAM
caucuauuucuagaaugcag

SEQ ID NO: 23158 - RNA, 20 nt, Artificial Sequence
  targeting sequence with TTCN PAM
uguccuaggcucaagugauc

SEQ ID NO: 23159 - RNA, 20 nt, Artificial Sequence
  targeting sequence with TTCN PAM
aggcugcaguaagcuaugau

SEQ ID NO: 23160 - RNA, 20 nt, Artificial Sequence
  targeting sequence with TTCN PAM
uaaaacaauuuuuaaauguu

SEQ ID NO: 23161 - RNA, 20 nt, Artificial Sequence
  targeting sequence with TTCN PAM
guuuuuacacagucauuacc

SEQ ID NO: 23162 - RNA, 20 nt, Artificial Sequence
  targeting sequence with TTCN PAM
cuaacucccaggcucaagug

SEQ ID NO: 23163 - RNA, 20 nt, Artificial Sequence
  targeting sequence with TTCN PAM
uuuuuguagaguugggcucu

SEQ ID NO: 23164 - RNA, 20 nt, Artificial Sequence
  targeting sequence with TTCN PAM
ccugccuuagccucccaagu

SEQ ID NO: 23165 - RNA, 20 nt, Artificial Sequence
  targeting sequence with TTCN PAM
agcgauucuccugccuuagc

SEQ ID NO: 23166 - RNA, 20 nt, Artificial Sequence
  targeting sequence with TTCN PAM
uggguucaagcgauucuccu

SEQ ID NO: 23167 - RNA, 20 nt, Artificial Sequence
  targeting sequence with TTCN PAM
ggucuccgcucacacucaug

SEQ ID NO: 23168 - RNA, 20 nt, Artificial Sequence
  targeting sequence with TTCN PAM
ugagucuccuucaggucucc

SEQ ID NO: 23169 - RNA, 20 nt, Artificial Sequence
  targeting sequence with TTCN PAM
cauuuuacagaguggagaac

SEQ ID NO: 23170 - RNA, 20 nt, Artificial Sequence
  targeting sequence with TTCN PAM
ccacucuguaaaaugggaau

SEQ ID NO: 23171 - RNA, 20 nt, Artificial Sequence
  targeting sequence with TTCN PAM
guucuccacucuguaaaaug

SEQ ID NO: 23172 - RNA, 20 nt, Artificial Sequence
  targeting sequence with TTCN PAM
acccacccuuacaucuggac

SEQ ID NO: 23173 - RNA, 20 nt, Artificial Sequence
  targeting sequence with TTCN PAM
cccucauugggcaaggcucu

SEQ ID NO: 23174 - RNA, 20 nt, Artificial Sequence
  targeting sequence with TTCN PAM
cuguucucccucauugggca

SEQ ID NO: 23175 - RNA, 20 nt, Artificial Sequence
  targeting sequence with TTCN PAM
cgaaccaggcucucauggag

SEQ ID NO: 23176 - RNA, 20 nt, Artificial Sequence
  targeting sequence with TTCN PAM
ugaaucuuuagacccuaugg

SEQ ID NO: 23177 - RNA, 20 nt, Artificial Sequence
  targeting sequence with TTCN PAM
ccaugagagccugguucgug

SEQ ID NO: 23178 - RNA, 20 nt, Artificial Sequence
  targeting sequence with TTCN PAM
ucgucugagcaaacugaggc

SEQ ID NO: 23179 - RNA, 20 nt, Artificial Sequence
  targeting sequence with TTCN PAM
ccucucugggccucaguuug

SEQ ID NO: 23180 - RNA, 20 nt, Artificial Sequence
  targeting sequence with TTCN PAM
uuccccucucugggccucag

SEQ ID NO: 23181 - RNA, 20 nt, Artificial Sequence
  targeting sequence with TTCN PAM
agcuggucuuugagucacca

SEQ ID NO: 23182 - RNA, 20 nt, Artificial Sequence
  targeting sequence with TTCN PAM
acugccccacgccaggccug

SEQ ID NO: 23183 - RNA, 20 nt, Artificial Sequence
  targeting sequence with TTCN PAM
auuaccccagcuaaaccuuu

SEQ ID NO: 23184 - RNA, 20 nt, Artificial Sequence
  targeting sequence with TTCN PAM
uuagucauuuauaccauggu

SEQ ID NO: 23185 - RNA, 20 nt, Artificial Sequence
  targeting sequence with TTCN PAM
caccaugguauaaaugacua

SEQ ID NO: 23186 - RNA, 20 nt, Artificial Sequence
  targeting sequence with TTCN PAM
ugagagcuaucuuugaugag

SEQ ID NO: 23187 - RNA, 20 nt, Artificial Sequence
  targeting sequence with TTCN PAM
caaaccuggcuaugccuccc

SEQ ID NO: 23188 - RNA, 20 nt, Artificial Sequence
  targeting sequence with TTCN PAM
ugggguaucagcuucccaaa

SEQ ID NO: 23189 - RNA, 20 nt, Artificial Sequence
  targeting sequence with TTCN PAM
ucugcaaaauggauauagca

SEQ ID NO: 23190 - RNA, 20 nt, Artificial Sequence
  targeting sequence with TTCN PAM
aaugacccuuccagcucacu

SEQ ID NO: 23191 - RNA, 20 nt, Artificial Sequence
  targeting sequence with TTCN PAM
aagucaccuacucugaccau

SEQ ID NO: 23192 - RNA, 20 nt, Artificial Sequence
  targeting sequence with TTCN PAM
agcucacuaugagucuguuu

SEQ ID NO: 23193 - RNA, 20 nt, Artificial Sequence
  targeting sequence with TTCN PAM
ugaacaaagagcauuuuuug

SEQ ID NO: 23194 - RNA, 20 nt, Artificial Sequence
  targeting sequence with TTCN PAM
ggaaaacagacucauaguga

SEQ ID NO: 23195 - RNA, 20 nt, Artificial Sequence
  targeting sequence with TTCN PAM
ugggccggacacggugguuc

SEQ ID NO: 23196 - RNA, 20 nt, Artificial Sequence
  targeting sequence with TTCN PAM
cuccuauaauccuggcacuu

SEQ ID NO: 23197 - RNA, 20 nt, Artificial Sequence
  targeting sequence with TTCN PAM
ggaccagccugggcaacaua

SEQ ID NO: 23198 - RNA, 20 nt, Artificial Sequence
  targeting sequence with TTCN PAM
ucgucaagcuuuacagaaua

SEQ ID NO: 23199 - RNA, 20 nt, Artificial Sequence
  targeting sequence with TTCN PAM
ucaagcuuuacagaauaaag

SEQ ID NO: 23200 - RNA, 20 nt, Artificial Sequence
  targeting sequence with TTCN PAM
guaaagcuugacgaagaaaa

SEQ ID NO: 23201 - RNA, 20 nt, Artificial Sequence
  targeting sequence with TTCN PAM
ccaucaccagggcuccauga

SEQ ID NO: 23202 - RNA, 20 nt, Artificial Sequence
  targeting sequence with TTCN PAM
caauugcaaccucauggagc

SEQ ID NO: 23203 - RNA, 20 nt, Artificial Sequence
  targeting sequence with TTCN PAM
uccuuugugaguuucacaau

SEQ ID NO: 23204 - RNA, 20 nt, Artificial Sequence
  targeting sequence with TTCN PAM
ccucucugucucagguuccu

SEQ ID NO: 23205 - RNA, 20 nt, Artificial Sequence
  targeting sequence with TTCN PAM
cccacucacucguucauuca

SEQ ID NO: 23206 - RNA, 20 nt, Artificial Sequence
  targeting sequence with TTCN PAM
uucaacaaauauucaggagc

SEQ ID NO: 23207 - RNA, 20 nt, Artificial Sequence
  targeting sequence with TTCN PAM
acaaauauucaggagcaccu

SEQ ID NO: 23208 - RNA, 20 nt, Artificial Sequence
  targeting sequence with TTCN PAM
ggagcaccuucuaggugcca

SEQ ID NO: 23209 - RNA, 20 nt, Artificial Sequence
  targeting sequence with TTCN PAM
aggugccaggcccuggagac

SEQ ID NO: 23210 - RNA, 20 nt, Artificial Sequence
  targeting sequence with TTCN PAM
cugaugugucuccagggccu

SEQ ID NO: 23211 - RNA, 20 nt, Artificial Sequence
  targeting sequence with TTCN PAM
acuacaggccaagcaccaug

SEQ ID NO: 23212 - RNA, 20 nt, Artificial Sequence
  targeting sequence with TTCN PAM
cagagaccagcauggugcuu

SEQ ID NO: 23213 - RNA, 20 nt, Artificial Sequence
  targeting sequence with TTCN PAM
augcugucagaagcacuaug

SEQ ID NO: 23214 - RNA, 20 nt, Artificial Sequence
  targeting sequence with TTCN PAM
gacagcauggaagcuuuuua

SEQ ID NO: 23215 - RNA, 20 nt, Artificial Sequence
  targeting sequence with TTCN PAM
ggccaugaggguccacguca

SEQ ID NO: 23216 - RNA, 20 nt, Artificial Sequence
  targeting sequence with TTCN PAM
gacguggacccucauggcca

SEQ ID NO: 23217 - RNA, 20 nt, Artificial Sequence
  targeting sequence with TTCN PAM
cugcagcccaccugggcucc

SEQ ID NO: 23218 - RNA, 20 nt, Artificial Sequence
  targeting sequence with TTCN PAM
gagcagacagaucugggaau

SEQ ID NO: 23219 - RNA, 20 nt, Artificial Sequence
  targeting sequence with TTCN PAM
cagaucugucugcucagaag

SEQ ID NO: 23220 - RNA, 20 nt, Artificial Sequence
  targeting sequence with TTCN PAM
cacccaggauucccagaucu

SEQ ID NO: 23221 - RNA, 20 nt, Artificial Sequence
  targeting sequence with TTCN PAM
caggcaucagggcuuugcac

SEQ ID NO: 23222 - RNA, 20 nt, Artificial Sequence
  targeting sequence with TTCN PAM
gccuggauguccuuccccug

SEQ ID NO: 23223 - RNA, 20 nt, Artificial Sequence
  targeting sequence with TTCN PAM
ccugaagcuuccuccuguug

SEQ ID NO: 23224 - RNA, 20 nt, Artificial Sequence
  targeting sequence with TTCN PAM
ggggaaggacauccaggcgg

SEQ ID NO: 23225 - RNA, 20 nt, Artificial Sequence
  targeting sequence with TTCN PAM
uccuguuguuccguucucag

SEQ ID NO: 23226 - RNA, 20 nt, Artificial Sequence
  targeting sequence with TTCN PAM
guucucagcucaagcuccag

SEQ ID NO: 23227 - RNA, 20 nt, Artificial Sequence
  targeting sequence with TTCN PAM
cagcucaagcuccagcuucu

SEQ ID NO: 23228 - RNA, 20 nt, Artificial Sequence
  targeting sequence with TTCN PAM
cagagaagccuccuguguug

SEQ ID NO: 23229 - RNA, 20 nt, Artificial Sequence
  targeting sequence with TTCN PAM
cugagaagcuggagcuugag

SEQ ID NO: 23230 - RNA, 20 nt, Artificial Sequence
  targeting sequence with TTCN PAM
gucgcagccacucccaacac

SEQ ID NO: 23231 - RNA, 20 nt, Artificial Sequence
  targeting sequence with TTCN PAM
cucuucuauuuguuuguggu

SEQ ID NO: 23232 - RNA, 20 nt, Artificial Sequence
  targeting sequence with TTCN PAM
auuuguuuguggucccugug

SEQ ID NO: 23233 - RNA, 20 nt, Artificial Sequence
  targeting sequence with TTCN PAM
ugugagcaggagcuugcucu

SEQ ID NO: 23234 - RNA, 20 nt, Artificial Sequence
  targeting sequence with TTCN PAM
uguacccuguguguccccaa

SEQ ID NO: 23235 - RNA, 20 nt, Artificial Sequence
  targeting sequence with TTCN PAM
uuccugggaggugucaucau

SEQ ID NO: 23236 - RNA, 20 nt, Artificial Sequence
  targeting sequence with TTCN PAM
ugggaggugucaucauguug

SEQ ID NO: 23237 - RNA, 20 nt, Artificial Sequence
  targeting sequence with TTCN PAM
cccagucaucugcccccaag

SEQ ID NO: 23238 - RNA, 20 nt, Artificial Sequence
  targeting sequence with TTCN PAM
uucucacgguacauccugcu

SEQ ID NO: 23239 - RNA, 20 nt, Artificial Sequence
  targeting sequence with TTCN PAM
cacgguacauccugcuauuc

SEQ ID NO: 23240 - RNA, 20 nt, Artificial Sequence
  targeting sequence with TTCN PAM
ggaaucggcccucguggggc

SEQ ID NO: 23241 - RNA, 20 nt, Artificial Sequence
  targeting sequence with TTCN PAM
agaauagcaggauguaccgu

SEQ ID NO: 23242 - RNA, 20 nt, Artificial Sequence
  targeting sequence with TTCN PAM
gacuggaguccccugaaggg

SEQ ID NO: 23243 - RNA, 20 nt, Artificial Sequence
  targeting sequence with TTCN PAM
ggggacuccagucugaaggg

SEQ ID NO: 23244 - RNA, 20 nt, Artificial Sequence
  targeting sequence with TTCN PAM
gccccuccccugcucuggua

SEQ ID NO: 23245 - RNA, 20 nt, Artificial Sequence
  targeting sequence with TTCN PAM
acaccagugaucugcccaag

SEQ ID NO: 23246 - RNA, 20 nt, Artificial Sequence
  targeting sequence with TTCN PAM
ucuggauaaagccagguucc

SEQ ID NO: 23247 - RNA, 20 nt, Artificial Sequence
  targeting sequence with TTCN PAM
ccggccuagcguucaagacc

SEQ ID NO: 23248 - RNA, 20 nt, Artificial Sequence
  targeting sequence with TTCN PAM
agacccauuacaacugcccc

SEQ ID NO: 23249 - RNA, 20 nt, Artificial Sequence
  targeting sequence with TTCN PAM
ccaccuagccaccuggcaaa

SEQ ID NO: 23250 - RNA, 20 nt, Artificial Sequence
  targeting sequence with TTCN PAM
cucaaaggcccaaacauggc

SEQ ID NO: 23251 - RNA, 20 nt, Artificial Sequence
  targeting sequence with TTCN PAM
guccaggguggcugugaggu

SEQ ID NO: 23252 - RNA, 20 nt, Artificial Sequence
  targeting sequence with TTCN PAM
ucccacauuugaguccuccu

SEQ ID NO: 23253 - RNA, 20 nt, Artificial Sequence
  targeting sequence with TTCN PAM
cacauuugaguccuccucag

SEQ ID NO: 23254 - RNA, 20 nt, Artificial Sequence
  targeting sequence with TTCN PAM
uuccaucuuuguauucccag

SEQ ID NO: 23255 - RNA, 20 nt, Artificial Sequence
  targeting sequence with TTCN PAM
aucuuuguauucccaggggc

SEQ ID NO: 23256 - RNA, 20 nt, Artificial Sequence
  targeting sequence with TTCN PAM
caggggccugcaaauaaaug

SEQ ID NO: 23257 - RNA, 20 nt, Artificial Sequence
  targeting sequence with TTCN PAM
uuaaacauuuauuugcaggc

SEQ ID NO: 23258 - RNA, 20 nt, Artificial Sequence
  targeting sequence with TTCN PAM
uucauuaaacauuuauuugc

SEQ ID NO: 23259 - RNA, 20 nt, Artificial Sequence
  targeting sequence with TTCN PAM
cucucuuguucguucauuaa

SEQ ID NO: 23260 - RNA, 20 nt, Artificial Sequence
  targeting sequence with TTCN PAM
aauuccaugcaacaaggauu

SEQ ID NO: 23261 - RNA, 20 nt, Artificial Sequence
  targeting sequence with TTCN PAM
augcaacaaggauugggcuc

SEQ ID NO: 23262 - RNA, 20 nt, Artificial Sequence
  targeting sequence with TTCN PAM
ggugccagacacauagccua

SEQ ID NO: 23263 - RNA, 20 nt, Artificial Sequence
  targeting sequence with TTCN PAM
guuucuggugccagacacau

SEQ ID NO: 23264 - RNA, 20 nt, Artificial Sequence
  targeting sequence with TTCN PAM
cccacaaguuaccucuggag

SEQ ID NO: 23265 - RNA, 20 nt, Artificial Sequence
  targeting sequence with TTCN PAM
uucccccacaaguuaccucu

SEQ ID NO: 23266 - RNA, 20 nt, Artificial Sequence
  targeting sequence with TTCN PAM
cccagucucucaucucguca

SEQ ID NO: 23267 - RNA, 20 nt, Artificial Sequence
  targeting sequence with TTCN PAM
gguuuauucucccagucucu

SEQ ID NO: 23268 - RNA, 20 nt, Artificial Sequence
  targeting sequence with TTCN PAM
aacccaggccaccagacuga

SEQ ID NO: 23269 - RNA, 20 nt, Artificial Sequence
  targeting sequence with TTCN PAM
gcaugacuugucugucccaa

SEQ ID NO: 23270 - RNA, 20 nt, Artificial Sequence
  targeting sequence with TTCN PAM
ccucccuuuuccuggauccu

SEQ ID NO: 23271 - RNA, 20 nt, Artificial Sequence
  targeting sequence with TTCN PAM
uggauccugaguaccucucc

SEQ ID NO: 23272 - RNA, 20 nt, Artificial Sequence
  targeting sequence with TTCN PAM
uccuagugucaccuuggccc

SEQ ID NO: 23273 - RNA, 20 nt, Artificial Sequence
  targeting sequence with TTCN PAM
aagaggggccaaggugacac

SEQ ID NO: 23274 - RNA, 20 nt, Artificial Sequence
  targeting sequence with TTCN PAM
gcagcggggauuaauaugau

SEQ ID NO: 23275 - RNA, 20 nt, Artificial Sequence
  targeting sequence with TTCN PAM
uaaucauauuaauccccgcu

SEQ ID NO: 23276 - RNA, 20 nt, Artificial Sequence
  targeting sequence with TTCN PAM
gccaggagcuuaggaggggg

SEQ ID NO: 23277 - RNA, 20 nt, Artificial Sequence
  targeting sequence with TTCN PAM
gacccccccagacccuuaua

SEQ ID NO: 23278 - RNA, 20 nt, Artificial Sequence
  targeting sequence with TTCN PAM
cagcauucuugggugggagc

SEQ ID NO: 23279 - RNA, 20 nt, Artificial Sequence
  targeting sequence with TTCN PAM
ugggugggagcagccacggg

SEQ ID NO: 23280 - RNA, 20 nt, Artificial Sequence
  targeting sequence with TTCN PAM
uggcuguggcccuuguggcu

SEQ ID NO: 23281 - RNA, 20 nt, Artificial Sequence
  targeting sequence with TTCN PAM
gugccauucauggcuguggc

SEQ ID NO: 23282 - RNA, 20 nt, Artificial Sequence
  targeting sequence with TTCN PAM
acgugcccuucuccaaugcg

SEQ ID NO: 23283 - RNA, 20 nt, Artificial Sequence
  targeting sequence with TTCN PAM
ccaaugcgacggguguggua

SEQ ID NO: 23284 - RNA, 20 nt, Artificial Sequence
  targeting sequence with TTCN PAM
aguacccacaguacuaccug

SEQ ID NO: 23285 - RNA, 20 nt, Artificial Sequence
  targeting sequence with TTCN PAM
ccaugcuggccgccuacaug

SEQ ID NO: 23286 - RNA, 20 nt, Artificial Sequence
  targeting sequence with TTCN PAM
gcugaucgugcugggcuucc

SEQ ID NO: 23287 - RNA, 20 nt, Artificial Sequence
  targeting sequence with TTCN PAM
ccaucaacuuccucacgcuc

SEQ ID NO: 23288 - RNA, 20 nt, Artificial Sequence
  targeting sequence with TTCN PAM
ucacgcucuacgucaccguc

SEQ ID NO: 23289 - RNA, 20 nt, Artificial Sequence
  targeting sequence with TTCN PAM
ugugcuggacggugacguag

SEQ ID NO: 23290 - RNA, 20 nt, Artificial Sequence
  targeting sequence with TTCN PAM
ugguccuagguggcuucacc

SEQ ID NO: 23291 - RNA, 20 nt, Artificial Sequence
  targeting sequence with TTCN PAM
ccagcacccucuacaccucu

SEQ ID NO: 23292 - RNA, 20 nt, Artificial Sequence
  targeting sequence with TTCN PAM
ucuucgggcccacaggaugc

SEQ ID NO: 23293 - RNA, 20 nt, Artificial Sequence
  targeting sequence with TTCN PAM
ggcccacaggaugcaauuug

SEQ ID NO: 23294 - RNA, 20 nt, Artificial Sequence
  targeting sequence with TTCN PAM
uugccacccugggcgguaug

SEQ ID NO: 23295 - RNA, 20 nt, Artificial Sequence
  targeting sequence with TTCN PAM
cccuucuccuguccugucaa

SEQ ID NO: 23296 - RNA, 20 nt, Artificial Sequence
  targeting sequence with TTCN PAM
ccuguccugucaauguuauc

SEQ ID NO: 23297 - RNA, 20 nt, Artificial Sequence
  targeting sequence with TTCN PAM
gucaacaaacaccauucaug

SEQ ID NO: 23298 - RNA, 20 nt, Artificial Sequence
  targeting sequence with TTCN PAM
uggugauagccgggcugcug

SEQ ID NO: 23299 - RNA, 20 nt, Artificial Sequence
  targeting sequence with TTCN PAM
gugccagcccugcacaaaca

SEQ ID NO: 23300 - RNA, 20 nt, Artificial Sequence
  targeting sequence with TTCN PAM
cagcaagaaaacugagcuga

SEQ ID NO: 23301 - RNA, 20 nt, Artificial Sequence
  targeting sequence with TTCN PAM
ugcugugaaauuagacaagc

SEQ ID NO: 23302 - RNA, 20 nt, Artificial Sequence
  targeting sequence with TTCN PAM
uugagccucagcucaguuuu

SEQ ID NO: 23303 - RNA, 20 nt, Artificial Sequence
  targeting sequence with TTCN PAM
aacucaacucugcacccguc

SEQ ID NO: 23304 - RNA, 20 nt, Artificial Sequence
  targeting sequence with TTCN PAM
cuuggagcagcugugcugag

SEQ ID NO: 23305 - RNA, 20 nt, Artificial Sequence
  targeting sequence with TTCN PAM
cacccugagcuugggccccc

SEQ ID NO: 23306 - RNA, 20 nt, Artificial Sequence
  targeting sequence with TTCN PAM
auucuccagucauugggucu

SEQ ID NO: 23307 - RNA, 20 nt, Artificial Sequence
  targeting sequence with TTCN PAM
ccagucauugggucuucccu

SEQ ID NO: 23308 - RNA, 20 nt, Artificial Sequence
  targeting sequence with TTCN PAM
cugugcugggcaaugggcuc

SEQ ID NO: 23309 - RNA, 20 nt, Artificial Sequence
  targeting sequence with TTCN PAM
aagucuccugguguugagaa

SEQ ID NO: 23310 - RNA, 20 nt, Artificial Sequence
  targeting sequence with TTCN PAM
caacaccaggagacuuggaa

SEQ ID NO: 23311 - RNA, 20 nt, Artificial Sequence
  targeting sequence with TTCN PAM
gagcggcugcuugcgguucu

SEQ ID NO: 23312 - RNA, 20 nt, Artificial Sequence
  targeting sequence with TTCN PAM
uuuuugcuuuagaauaaugu

SEQ ID NO: 23313 - RNA, 20 nt, Artificial Sequence
  targeting sequence with TTCN PAM
aaagcaaaaaggaacugcuu

SEQ ID NO: 23314 - RNA, 20 nt, Artificial Sequence
  targeting sequence with TTCN PAM
uguuaaaugcaagacauuau

SEQ ID NO: 23315 - RNA, 20 nt, Artificial Sequence
  targeting sequence with TTCN PAM
ucucuguuaagugggaucug

SEQ ID NO: 23316 - RNA, 20 nt, Artificial Sequence
  targeting sequence with TTCN PAM
ccucucccugccucaguuuu

SEQ ID NO: 23317 - RNA, 20 nt, Artificial Sequence
  targeting sequence with TTCN PAM
uggaucacagccaggagacc

SEQ ID NO: 23318 - RNA, 20 nt, Artificial Sequence
  targeting sequence with TTCN PAM
agcgucuccuccugcaucuc

SEQ ID NO: 23319 - RNA, 20 nt, Artificial Sequence
  targeting sequence with TTCN PAM
cagggaaucucuggccauug

SEQ ID NO: 23320 - RNA, 20 nt, Artificial Sequence
  targeting sequence with TTCN PAM
cugagaaugggaccgaggca

SEQ ID NO: 23321 - RNA, 20 nt, Artificial Sequence
  targeting sequence with TTCN PAM
auaaucacagaucacucagu

SEQ ID NO: 23322 - RNA, 20 nt, Artificial Sequence
  targeting sequence with TTCN PAM
ggccagaaggugggugugcc

SEQ ID NO: 23323 - RNA, 20 nt, Artificial Sequence
  targeting sequence with TTCN PAM
ggccagaacugagugaucug

SEQ ID NO: 23324 - RNA, 20 nt, Artificial Sequence
  targeting sequence with TTCN PAM
cugcagggucagucccaguu

SEQ ID NO: 23325 - RNA, 20 nt, Artificial Sequence
  targeting sequence with TTCN PAM
cuguuaggaaugucccaguu

SEQ ID NO: 23326 - RNA, 20 nt, Artificial Sequence
  targeting sequence with TTCN PAM
uaacagugaaagggacaaua

SEQ ID NO: 23327 - RNA, 20 nt, Artificial Sequence
  targeting sequence with TTCN PAM
auagggagaguggccauaua

SEQ ID NO: 23328 - RNA, 20 nt, Artificial Sequence
  targeting sequence with TTCN PAM
ugggguggugagcaggacag

SEQ ID NO: 23329 - RNA, 20 nt, Artificial Sequence
  targeting sequence with TTCN PAM
gacaucuguccugcucacca

SEQ ID NO: 23330 - RNA, 20 nt, Artificial Sequence
  targeting sequence with TTCN PAM
aucauuuccuucuucuuccu

SEQ ID NO: 23331 - RNA, 20 nt, Artificial Sequence
  targeting sequence with TTCN PAM
uucuucuuccucugggcaaa

SEQ ID NO: 23332 - RNA, 20 nt, Artificial Sequence
  targeting sequence with TTCN PAM
ucuuccucugggcaaaacau

SEQ ID NO: 23333 - RNA, 20 nt, Artificial Sequence
  targeting sequence with TTCN PAM
uccucugggcaaaacauugc

SEQ ID NO: 23334 - RNA, 20 nt, Artificial Sequence
  targeting sequence with TTCN PAM
ucugggcaaaacauugcaca

SEQ ID NO: 23335 - RNA, 20 nt, Artificial Sequence
  targeting sequence with TTCN PAM
uggcuccuaggagaggcccc

SEQ ID NO: 23336 - RNA, 20 nt, Artificial Sequence
  targeting sequence with TTCN PAM
uuucccgagaagggagaggg

SEQ ID NO: 23337 - RNA, 20 nt, Artificial Sequence
  targeting sequence with TTCN PAM
cgagaagggagagggaggaa

SEQ ID NO: 23338 - RNA, 20 nt, Artificial Sequence
  targeting sequence with TTCN PAM
cgggaaaugaaauaacccgg

SEQ ID NO: 23339 - RNA, 20 nt, Artificial Sequence
  targeting sequence with TTCN PAM
ucccucucccuucucgggaa

SEQ ID NO: 23340 - RNA, 20 nt, Artificial Sequence
  targeting sequence with TTCN PAM
ggguuuccaccaccucugca

SEQ ID NO: 23341 - RNA, 20 nt, Artificial Sequence
  targeting sequence with TTCN PAM
accaccucugcauuccuucc

SEQ ID NO: 23342 - RNA, 20 nt, Artificial Sequence
  targeting sequence with TTCN PAM
uucccaacaaggaacucugc

SEQ ID NO: 23343 - RNA, 20 nt, Artificial Sequence
  targeting sequence with TTCN PAM
caacaaggaacucugcccca

SEQ ID NO: 23344 - RNA, 20 nt, Artificial Sequence
  targeting sequence with TTCN PAM
uuguugggaaggaaugcaga

SEQ ID NO: 23345 - RNA, 20 nt, Artificial Sequence
  targeting sequence with TTCN PAM
ucugcuaaacacacacacac

SEQ ID NO: 23346 - RNA, 20 nt, Artificial Sequence
  targeting sequence with TTCN PAM
gcuaaacacacacacacaca

SEQ ID NO: 23347 - RNA, 20 nt, Artificial Sequence
  targeting sequence with TTCN PAM
caguucaauccugacccccu

SEQ ID NO: 23348 - RNA, 20 nt, Artificial Sequence
  targeting sequence with TTCN PAM
auccugacccccugaucuga

SEQ ID NO: 23349 - RNA, 20 nt, Artificial Sequence
  targeting sequence with TTCN PAM
ugucccuuaugggcccagag

SEQ ID NO: 23350 - RNA, 20 nt, Artificial Sequence
  targeting sequence with TTCN PAM
cccauucccuggaauuucuu

SEQ ID NO: 23351 - RNA, 20 nt, Artificial Sequence
  targeting sequence with TTCN PAM
cuggaauuucuuugcccagc

SEQ ID NO: 23352 - RNA, 20 nt, Artificial Sequence
  targeting sequence with TTCN PAM
agggaaugggggaaguuauu

SEQ ID NO: 23353 - RNA, 20 nt, Artificial Sequence
  targeting sequence with TTCN PAM
uugcccagcucuccucagcg

SEQ ID NO: 23354 - RNA, 20 nt, Artificial Sequence
  targeting sequence with TTCN PAM
cccuccucccagcaccaagc

SEQ ID NO: 23355 - RNA, 20 nt, Artificial Sequence
  targeting sequence with TTCN PAM
ccaaggccuccucaaauccc

SEQ ID NO: 23356 - RNA, 20 nt, Artificial Sequence
  targeting sequence with TTCN PAM
uagcuacccucucccugucu

SEQ ID NO: 23357 - RNA, 20 nt, Artificial Sequence
  targeting sequence with TTCN PAM
ccugcaaggcagucagcagg

SEQ ID NO: 23358 - RNA, 20 nt, Artificial Sequence
  targeting sequence with TTCN PAM
gcuucggggagaaccaugcc

SEQ ID NO: 23359 - RNA, 20 nt, Artificial Sequence
  targeting sequence with TTCN PAM
gggagaaccaugccaucaug

SEQ ID NO: 23360 - RNA, 20 nt, Artificial Sequence
  targeting sequence with TTCN PAM
ccccgaagcggaaguugcuc

SEQ ID NO: 23361 - RNA, 20 nt, Artificial Sequence
  targeting sequence with TTCN PAM
ccugggucauggcgcuggcc

SEQ ID NO: 23362 - RNA, 20 nt, Artificial Sequence
  targeting sequence with TTCN PAM
gcucagugccauuaccugga

SEQ ID NO: 23363 - RNA, 20 nt, Artificial Sequence
  targeting sequence with TTCN PAM
cuucugcucagugccauuac

SEQ ID NO: 23364 - RNA, 20 nt, Artificial Sequence
  targeting sequence with TTCN PAM
ucccuucugcucagugccau

SEQ ID NO: 23365 - RNA, 20 nt, Artificial Sequence
  targeting sequence with TTCN PAM
aggcacugaccuuguauguc

SEQ ID NO: 23366 - RNA, 20 nt, Artificial Sequence
  targeting sequence with TTCN PAM
gcccuacaccccuacccuga

SEQ ID NO: 23367 - RNA, 20 nt, Artificial Sequence
  targeting sequence with TTCN PAM
ucugcccuacaccccuaccc

SEQ ID NO: 23368 - RNA, 20 nt, Artificial Sequence
  targeting sequence with TTCN PAM
ucuucugcccuacaccccua

SEQ ID NO: 23369 - RNA, 20 nt, Artificial Sequence
  targeting sequence with TTCN PAM
guuugacauggggcucagga

SEQ ID NO: 23370 - RNA, 20 nt, Artificial Sequence
  targeting sequence with TTCN PAM
ccuuggcugugccccuaauc

SEQ ID NO: 23371 - RNA, 20 nt, Artificial Sequence
  targeting sequence with TTCN PAM
aauccucuuuggucuaguac

SEQ ID NO: 23372 - RNA, 20 nt, Artificial Sequence
  targeting sequence with TTCN PAM
uagugcagguggccauauug

SEQ ID NO: 23373 - RNA, 20 nt, Artificial Sequence
  targeting sequence with TTCN PAM
aaggggccacaauauggcca

SEQ ID NO: 23374 - RNA, 20 nt, Artificial Sequence
  targeting sequence with TTCN PAM
ggagacagagggacaugagg

SEQ ID NO: 23375 - RNA, 20 nt, Artificial Sequence
  targeting sequence with TTCN PAM
cacucucacuucccuuuccu

SEQ ID NO: 23376 - RNA, 20 nt, Artificial Sequence
  targeting sequence with TTCN PAM
cuuuccuccucagucuugcu

SEQ ID NO: 23377 - RNA, 20 nt, Artificial Sequence
  targeting sequence with TTCN PAM
uccucagucuugcuaggguc

SEQ ID NO: 23378 - RNA, 20 nt, Artificial Sequence
  targeting sequence with TTCN PAM
uaccccuugcugaauuugag

SEQ ID NO: 23379 - RNA, 20 nt, Artificial Sequence
  targeting sequence with TTCN PAM
gcaagggguaagaaauggac

SEQ ID NO: 23380 - RNA, 20 nt, Artificial Sequence
  targeting sequence with TTCN PAM
ccaucuucuccaaucuggcc

SEQ ID NO: 23381 - RNA, 20 nt, Artificial Sequence
  targeting sequence with TTCN PAM
ccaaucuggccuaguucuau

SEQ ID NO: 23382 - RNA, 20 nt, Artificial Sequence
  targeting sequence with TTCN PAM
auccucuggaagcagagccg

SEQ ID NO: 23383 - RNA, 20 nt, Artificial Sequence
  targeting sequence with TTCN PAM
agaggauagaacuaggccag

SEQ ID NO: 23384 - RNA, 20 nt, Artificial Sequence
  targeting sequence with TTCN PAM
ugaggcccguccacugucac

SEQ ID NO: 23385 - RNA, 20 nt, Artificial Sequence
  targeting sequence with TTCN PAM
ugauauuggugacaguggac

SEQ ID NO: 23386 - RNA, 20 nt, Artificial Sequence
  targeting sequence with TTCN PAM
agcgcacgucauuaggacgu

SEQ ID NO: 23387 - RNA, 20 nt, Artificial Sequence
  targeting sequence with TTCN PAM
agaagcugcacaaagauccc

SEQ ID NO: 23388 - RNA, 20 nt, Artificial Sequence
  targeting sequence with TTCN PAM
ggaaacuagaggcuuccagc

SEQ ID NO: 23389 - RNA, 20 nt, Artificial Sequence
  targeting sequence with TTCN PAM
aggccaaagauggacacaca

SEQ ID NO: 23390 - RNA, 20 nt, Artificial Sequence
  targeting sequence with TTCN PAM
uagccccagggugagaguau

SEQ ID NO: 23391 - RNA, 20 nt, Artificial Sequence
  targeting sequence with TTCN PAM
ucaaaugcagagccugaggg

SEQ ID NO: 23392 - RNA, 20 nt, Artificial Sequence
  targeting sequence with TTCN PAM
uuguuugguggcugcguuac

SEQ ID NO: 23393 - RNA, 20 nt, Artificial Sequence
  targeting sequence with TTCN PAM
acaaggugcaucugcauccc

SEQ ID NO: 23394 - RNA, 20 nt, Artificial Sequence
  targeting sequence with TTCN PAM
auccugucacccagccaugc

SEQ ID NO: 23395 - RNA, 20 nt, Artificial Sequence
  targeting sequence with TTCN PAM
agggagggaaugugaagccc

SEQ ID NO: 23396 - RNA, 20 nt, Artificial Sequence
  targeting sequence with TTCN PAM
cucccuggaaaaggggauca

SEQ ID NO: 23397 - RNA, 20 nt, Artificial Sequence
  targeting sequence with TTCN PAM
cauucccucccuggaaaagg

SEQ ID NO: 23398 - RNA, 20 nt, Artificial Sequence
  targeting sequence with TTCN PAM
ggggcuucacauucccuccc

SEQ ID NO: 23399 - RNA, 20 nt, Artificial Sequence
  targeting sequence with TTCN PAM
caagucccucacaggcaggg

SEQ ID NO: 23400 - RNA, 20 nt, Artificial Sequence
  targeting sequence with TTCN PAM
acacgagcacugcaggcccu

SEQ ID NO: 23401 - RNA, 20 nt, Artificial Sequence
  targeting sequence with TTCN PAM
ugguccacuucaccaucccc

SEQ ID NO: 23402 - RNA, 20 nt, Artificial Sequence
  targeting sequence with TTCN PAM
ccauccccaugauuaucauc

SEQ ID NO: 23403 - RNA, 20 nt, Artificial Sequence
  targeting sequence with TTCN PAM
gcuaugggcagcucgucuuc

SEQ ID NO: 23404 - RNA, 20 nt, Artificial Sequence
  targeting sequence with TTCN PAM
ccgucaaggagguacgggcc

SEQ ID NO: 23405 - RNA, 20 nt, Artificial Sequence
  targeting sequence with TTCN PAM
gugugguggcugacuccugc

SEQ ID NO: 23406 - RNA, 20 nt, Artificial Sequence
  targeting sequence with TTCN PAM
cugccuucugugugguggcu

SEQ ID NO: 23407 - RNA, 20 nt, Artificial Sequence
  targeting sequence with TTCN PAM
ugaucugcugggugcccuac

SEQ ID NO: 23408 - RNA, 20 nt, Artificial Sequence
  targeting sequence with TTCN PAM
acaucuucacccaccagggc

SEQ ID NO: 23409 - RNA, 20 nt, Artificial Sequence
  targeting sequence with TTCN PAM
cccaccagggcuccaacuuc

SEQ ID NO: 23410 - RNA, 20 nt, Artificial Sequence
  targeting sequence with TTCN PAM
gucccaucuucaugaccauc

SEQ ID NO: 23411 - RNA, 20 nt, Artificial Sequence
  targeting sequence with TTCN PAM
ugaccaucccagcguucuuu

SEQ ID NO: 23412 - RNA, 20 nt, Artificial Sequence
  targeting sequence with TTCN PAM
uugccaagagcgccgccauc

SEQ ID NO: 23413 - RNA, 20 nt, Artificial Sequence
  targeting sequence with TTCN PAM
ucaugauauagaugacaggg

SEQ ID NO: 23414 - RNA, 20 nt, Artificial Sequence
  targeting sequence with TTCN PAM
cagggcaggggagggggcuc

SEQ ID NO: 23415 - RNA, 20 nt, Artificial Sequence
  targeting sequence with TTCN PAM
cacacacuccccauugggac

SEQ ID NO: 23416 - RNA, 20 nt, Artificial Sequence
  targeting sequence with TTCN PAM
uggccccacucagaacugcu

SEQ ID NO: 23417 - RNA, 20 nt, Artificial Sequence
  targeting sequence with TTCN PAM
gaguggggccaggaaucugc

SEQ ID NO: 23418 - RNA, 20 nt, Artificial Sequence
  targeting sequence with TTCN PAM
gcaguucugaguggggccag

SEQ ID NO: 23419 - RNA, 20 nt, Artificial Sequence
  targeting sequence with TTCN PAM
ugggcccacccugagauuca

SEQ ID NO: 23420 - RNA, 20 nt, Artificial Sequence
  targeting sequence with TTCN PAM
agcaagcccuccacaggugg

SEQ ID NO: 23421 - RNA, 20 nt, Artificial Sequence
  targeting sequence with TTCN PAM
cccaccugagugagcaucug

SEQ ID NO: 23422 - RNA, 20 nt, Artificial Sequence
  targeting sequence with TTCN PAM
ggaagcccaaugucaaaguc

SEQ ID NO: 23423 - RNA, 20 nt, Artificial Sequence
  targeting sequence with TTCN PAM
agaacuagcugacuggagcu

SEQ ID NO: 23424 - RNA, 20 nt, Artificial Sequence
  targeting sequence with TTCN PAM
gacuuugacauugggcuucc

SEQ ID NO: 23425 - RNA, 20 nt, Artificial Sequence
  targeting sequence with TTCN PAM
cgacuuggguccuucugacu

SEQ ID NO: 23426 - RNA, 20 nt, Artificial Sequence
  targeting sequence with TTCN PAM
gcuuuauggagacuggccca

SEQ ID NO: 23427 - RNA, 20 nt, Artificial Sequence
  targeting sequence with TTCN PAM
gagggguaaagggguaaagg

SEQ ID NO: 23428 - RNA, 20 nt, Artificial Sequence
  targeting sequence with TTCN PAM
ucggagagguaccuccgagg

SEQ ID NO: 23429 - RNA, 20 nt, Artificial Sequence
  targeting sequence with TTCN PAM
gagacuguuuacccaacugu

SEQ ID NO: 23430 - RNA, 20 nt, Artificial Sequence
  targeting sequence with TTCN PAM
agcuguauggcccugggcaa

SEQ ID NO: 23431 - RNA, 20 nt, Artificial Sequence
  targeting sequence with TTCN PAM
uucucugugcuuugguuucc

SEQ ID NO: 23432 - RNA, 20 nt, Artificial Sequence
  targeting sequence with TTCN PAM
cugugcuuugguuuccucau

SEQ ID NO: 23433 - RNA, 20 nt, Artificial Sequence
  targeting sequence with TTCN PAM
ucauccauagaaagguagaa

SEQ ID NO: 23434 - RNA, 20 nt, Artificial Sequence
  targeting sequence with TTCN PAM
auggaugaggaaaccaaagc

SEQ ID NO: 23435 - RNA, 20 nt, Artificial Sequence
  targeting sequence with TTCN PAM
accuuucuauggaugaggaa

SEQ ID NO: 23436 - RNA, 20 nt, Artificial Sequence
  targeting sequence with TTCN PAM
guaaauuaucucuuguaauc

SEQ ID NO: 23437 - RNA, 20 nt, Artificial Sequence
  targeting sequence with TTCN PAM
uggugcccucugugugccaa

SEQ ID NO: 23438 - RNA, 20 nt, Artificial Sequence
  targeting sequence with TTCN PAM
cuccaggaagcuggauuuga

SEQ ID NO: 23439 - RNA, 20 nt, Artificial Sequence
  targeting sequence with TTCN PAM
uggagggaaccugcuaggca

SEQ ID NO: 23440 - RNA, 20 nt, Artificial Sequence
  targeting sequence with TTCN PAM
agcgccccauccacucaaau

SEQ ID NO: 23441 - RNA, 20 nt, Artificial Sequence
  targeting sequence with TTCN PAM
gccccucacgauuccagcgc

SEQ ID NO: 23442 - RNA, 20 nt, Artificial Sequence
  targeting sequence with TTCN PAM
ccccgacccuuugccugcuu

SEQ ID NO: 23443 - RNA, 20 nt, Artificial Sequence
  targeting sequence with TTCN PAM
aagcacacugugggcagccc

SEQ ID NO: 23444 - RNA, 20 nt, Artificial Sequence
  targeting sequence with TTCN PAM
aguuccggaacugcaugcuc

SEQ ID NO: 23445 - RNA, 20 nt, Artificial Sequence
  targeting sequence with TTCN PAM
ggaacugcaugcucaccacc

SEQ ID NO: 23446 - RNA, 20 nt, Artificial Sequence
  targeting sequence with TTCN PAM
ggaacuggaaggcaagaggc

SEQ ID NO: 23447 - RNA, 20 nt, Artificial Sequence
  targeting sequence with TTCN PAM
ugccgcagcagaugguggug

SEQ ID NO: 23448 - RNA, 20 nt, Artificial Sequence
  targeting sequence with TTCN PAM
cccagccacagccaucccac

SEQ ID NO: 23449 - RNA, 20 nt, Artificial Sequence
  targeting sequence with TTCN PAM
gcacaggcgcugcuccuggu

SEQ ID NO: 23450 - RNA, 20 nt, Artificial Sequence
  targeting sequence with TTCN PAM
uucugcacaggcgcugcucc

SEQ ID NO: 23451 - RNA, 20 nt, Artificial Sequence
  targeting sequence with TTCN PAM
uucauucugcacaggcgcug

SEQ ID NO: 23452 - RNA, 20 nt, Artificial Sequence
  targeting sequence with TTCN PAM
uaaaaaaaaaaaaaaaauua

SEQ ID NO: 23453 - RNA, 20 nt, Artificial Sequence
  targeting sequence with TTCN PAM
caggcugucccaggugagug

SEQ ID NO: 23454 - RNA, 20 nt, Artificial Sequence
  targeting sequence with TTCN PAM
ccaaggccagcgggaugugu

SEQ ID NO: 23455 - RNA, 20 nt, Artificial Sequence
  targeting sequence with TTCN PAM
ggaacacgaggauucuugcu

SEQ ID NO: 23456 - RNA, 20 nt, Artificial Sequence
  targeting sequence with TTCN PAM
ugaaagaugaguugggagga

SEQ ID NO: 23457 - RNA, 20 nt, Artificial Sequence
  targeting sequence with TTCN PAM
ugcuuucuggaaaagugucc

SEQ ID NO: 23458 - RNA, 20 nt, Artificial Sequence
  targeting sequence with TTCN PAM
ggaaaagugucccagcuuag

SEQ ID NO: 23459 - RNA, 20 nt, Artificial Sequence
  targeting sequence with TTCN PAM
agaaagcaagaauccucgug

SEQ ID NO: 23460 - RNA, 20 nt, Artificial Sequence
  targeting sequence with TTCN PAM
gugcuagacacuuaucccua

SEQ ID NO: 23461 - RNA, 20 nt, Artificial Sequence
  targeting sequence with TTCN PAM
ugcauccauccagcauuuau

SEQ ID NO: 23462 - RNA, 20 nt, Artificial Sequence
  targeting sequence with TTCN PAM
uuccugcauccauccagcau

SEQ ID NO: 23463 - RNA, 20 nt, Artificial Sequence
  targeting sequence with TTCN PAM
uccauuccuuccugcaucca

SEQ ID NO: 23464 - RNA, 20 nt, Artificial Sequence
  targeting sequence with TTCN PAM
uuccuccauuccuuccugca

SEQ ID NO: 23465 - RNA, 20 nt, Artificial Sequence
  targeting sequence with TTCN PAM
cauucauuccuccauuccuu

SEQ ID NO: 23466 - RNA, 20 nt, Artificial Sequence
  targeting sequence with TTCN PAM
cccuucccauucauuccucc

SEQ ID NO: 23467 - RNA, 20 nt, Artificial Sequence
  targeting sequence with TTCN PAM
cucccugggccucacuuucu

SEQ ID NO: 23468 - RNA, 20 nt, Artificial Sequence
  targeting sequence with TTCN PAM
ucuccuauaaaauggaaauc

SEQ ID NO: 23469 - RNA, 20 nt, Artificial Sequence
  targeting sequence with TTCN PAM
ccuauaaaauggaaauccca

SEQ ID NO: 23470 - RNA, 20 nt, Artificial Sequence
  targeting sequence with TTCN PAM
auuuuauaggagaagaaagu

SEQ ID NO: 23471 - RNA, 20 nt, Artificial Sequence
  targeting sequence with TTCN PAM
caguagcugcgugucggcag

SEQ ID NO: 23472 - RNA, 20 nt, Artificial Sequence
  targeting sequence with TTCN PAM
gcacuuuguaaauagcaaga

SEQ ID NO: 23473 - RNA, 20 nt, Artificial Sequence
  targeting sequence with TTCN PAM
ugcuauuuacaaagugcuga

SEQ ID NO: 23474 - RNA, 20 nt, Artificial Sequence
  targeting sequence with TTCN PAM
aguuaauguugugaauaaca

SEQ ID NO: 23475 - RNA, 20 nt, Artificial Sequence
  targeting sequence with TTCN PAM
caacauuaacuagaaucugu

SEQ ID NO: 23476 - RNA, 20 nt, Artificial Sequence
  targeting sequence with TTCN PAM
cuaucaggaggugauaauca

SEQ ID NO: 23477 - RNA, 20 nt, Artificial Sequence
  targeting sequence with TTCN PAM
gaugaugggguuucacccaa

SEQ ID NO: 23478 - RNA, 20 nt, Artificial Sequence
  targeting sequence with TTCN PAM
cccaaccuuggggcagguuu

SEQ ID NO: 23479 - RNA, 20 nt, Artificial Sequence
  targeting sequence with TTCN PAM
ugugacugucccugccuaca

SEQ ID NO: 23480 - RNA, 20 nt, Artificial Sequence
  targeting sequence with TTCN PAM
gcauuccugugacugucccu

SEQ ID NO: 23481 - RNA, 20 nt, Artificial Sequence
  targeting sequence with TTCN PAM
ggucugaugacugcauucug

SEQ ID NO: 23482 - RNA, 20 nt, Artificial Sequence
  targeting sequence with TTCN PAM
ccgucccccucccccagugu

SEQ ID NO: 23483 - RNA, 20 nt, Artificial Sequence
  targeting sequence with TTCN PAM
caaugagggugagauugggc

SEQ ID NO: 23484 - RNA, 20 nt, Artificial Sequence
  targeting sequence with TTCN PAM
caauguggccuauggagaga

SEQ ID NO: 23485 - RNA, 20 nt, Artificial Sequence
  targeting sequence with TTCN PAM
cucagccucuggaagccacc

SEQ ID NO: 23486 - RNA, 20 nt, Artificial Sequence
  targeting sequence with TTCN PAM
agaggcugagagaaaggccu

SEQ ID NO: 23487 - RNA, 20 nt, Artificial Sequence
  targeting sequence with TTCN PAM
agaggcuccaugcucuagau

SEQ ID NO: 23488 - RNA, 20 nt, Artificial Sequence
  targeting sequence with TTCN PAM
agauaaggaugacaucaggg

SEQ ID NO: 23489 - RNA, 20 nt, Artificial Sequence
  targeting sequence with TTCN PAM
aagcucuucgagauaaggau

SEQ ID NO: 23490 - RNA, 20 nt, Artificial Sequence
  targeting sequence with TTCN PAM
cacucuuuguuucuaagcuc

SEQ ID NO: 23491 - RNA, 20 nt, Artificial Sequence
  targeting sequence with TTCN PAM
acugggccuaccuuccuugg

SEQ ID NO: 23492 - RNA, 20 nt, Artificial Sequence
  targeting sequence with TTCN PAM
uuggggauguucaugggccc

SEQ ID NO: 23493 - RNA, 20 nt, Artificial Sequence
  targeting sequence with TTCN PAM
ugggccccaguuuccaguuu

SEQ ID NO: 23494 - RNA, 20 nt, Artificial Sequence
  targeting sequence with TTCN PAM
aguuucccuugccagacaag

SEQ ID NO: 23495 - RNA, 20 nt, Artificial Sequence
  targeting sequence with TTCN PAM
cuugccagacaagcccaucu

SEQ ID NO: 23496 - RNA, 20 nt, Artificial Sequence
  targeting sequence with TTCN PAM
gcaguugcuaguccauucuc

SEQ ID NO: 23497 - RNA, 20 nt, Artificial Sequence
  targeting sequence with TTCN PAM
ccauucuggagaaucugcuc

SEQ ID NO: 23498 - RNA, 20 nt, Artificial Sequence
  targeting sequence with TTCN PAM
ggagaaucugcuccaaaaag

SEQ ID NO: 23499 - RNA, 20 nt, Artificial Sequence
  targeting sequence with TTCN PAM
ccagaauggagaauggacua

SEQ ID NO: 23500 - RNA, 20 nt, Artificial Sequence
  targeting sequence with TTCN PAM
gacaccucagagauguggcc

SEQ ID NO: 23501 - RNA, 20 nt, Artificial Sequence
  targeting sequence with TTCN PAM
ccauauaagcaaagccagaa

SEQ ID NO: 23502 - RNA, 20 nt, Artificial Sequence
  targeting sequence with TTCN PAM
ggcuuugcuuauauggagaa

SEQ ID NO: 23503 - RNA, 20 nt, Artificial Sequence
  targeting sequence with TTCN PAM
cacucuauccacaggauaga

SEQ ID NO: 23504 - RNA, 20 nt, Artificial Sequence
  targeting sequence with TTCN PAM
aucuauccuguggauagagu

SEQ ID NO: 23505 - RNA, 20 nt, Artificial Sequence
  targeting sequence with TTCN PAM
accugaucccugacccuggg

SEQ ID NO: 23506 - RNA, 20 nt, Artificial Sequence
  targeting sequence with TTCN PAM
caggacugccuccuccaccu

SEQ ID NO: 23507 - RNA, 20 nt, Artificial Sequence
  targeting sequence with TTCN PAM
cauucccaggacugccuccu

SEQ ID NO: 23508 - RNA, 20 nt, Artificial Sequence
  targeting sequence with TTCN PAM
uuaucugcaaaaaagaaucu

SEQ ID NO: 23509 - RNA, 20 nt, Artificial Sequence
  targeting sequence with TTCN PAM
uuuuugcagauaaggaagcu

SEQ ID NO: 23510 - RNA, 20 nt, Artificial Sequence
  targeting sequence with TTCN PAM
ccguguuggucaggcugguc

SEQ ID NO: 23511 - RNA, 20 nt, Artificial Sequence
  targeting sequence with TTCN PAM
gugggcugaggcaggagaau

SEQ ID NO: 23512 - RNA, 20 nt, Artificial Sequence
  targeting sequence with TTCN PAM
ccugccucagcccacugaau

SEQ ID NO: 23513 - RNA, 20 nt, Artificial Sequence
  targeting sequence with TTCN PAM
agcgauucuccugccucagc

SEQ ID NO: 23514 - RNA, 20 nt, Artificial Sequence
  targeting sequence with TTCN PAM
gcucagagcuggccuuacua

SEQ ID NO: 23515 - RNA, 20 nt, Artificial Sequence
  targeting sequence with TTCN PAM
ccuuugggacagggucucua

SEQ ID NO: 23516 - RNA, 20 nt, Artificial Sequence
  targeting sequence with TTCN PAM
caccucggaggaggggguga

SEQ ID NO: 23517 - RNA, 20 nt, Artificial Sequence
  targeting sequence with TTCN PAM
uaucacuugugaccaaaagu

SEQ ID NO: 23518 - RNA, 20 nt, Artificial Sequence
  targeting sequence with TTCN PAM
gcccaaaugaguuggauuuc

SEQ ID NO: 23519 - RNA, 20 nt, Artificial Sequence
  targeting sequence with TTCN PAM
ugugagccaacaaugugucc

SEQ ID NO: 23520 - RNA, 20 nt, Artificial Sequence
  targeting sequence with TTCN PAM
ggcacaggguaucaccauga

SEQ ID NO: 23521 - RNA, 20 nt, Artificial Sequence
  targeting sequence with TTCN PAM
gugauuggccaagucuaggu

SEQ ID NO: 23522 - RNA, 20 nt, Artificial Sequence
  targeting sequence with TTCN PAM
aauaauggaauacuaggcau

SEQ ID NO: 23523 - RNA, 20 nt, Artificial Sequence
  targeting sequence with TTCN PAM
auuauuggaacgcuaagcau

SEQ ID NO: 23524 - RNA, 20 nt, Artificial Sequence
  targeting sequence with TTCN PAM
agccauggugaugcaguuag

SEQ ID NO: 23525 - RNA, 20 nt, Artificial Sequence
  targeting sequence with TTCN PAM
uccucugauuggucagaccu

SEQ ID NO: 23526 - RNA, 20 nt, Artificial Sequence
  targeting sequence with TTCN PAM
gccugcuugggcugcagggu

SEQ ID NO: 23527 - RNA, 20 nt, Artificial Sequence
  targeting sequence with TTCN PAM
caaaggaaagcccaggugcu

SEQ ID NO: 23528 - RNA, 20 nt, Artificial Sequence
  targeting sequence with TTCN PAM
uuugugaaaccuaccucucc

SEQ ID NO: 23529 - RNA, 20 nt, Artificial Sequence
  targeting sequence with TTCN PAM
gguaacagcaccugggcuuu

SEQ ID NO: 23530 - RNA, 20 nt, Artificial Sequence
  targeting sequence with TTCN PAM
cucuggguugauguuggcuc

SEQ ID NO: 23531 - RNA, 20 nt, Artificial Sequence
  targeting sequence with TTCN PAM
auucccucuggguugauguu

SEQ ID NO: 23532 - RNA, 20 nt, Artificial Sequence
  targeting sequence with TTCN PAM
gggcacguggcuggaccagg

SEQ ID NO: 23533 - RNA, 20 nt, Artificial Sequence
  targeting sequence with TTCN PAM
cccucaugucccugagauga

SEQ ID NO: 23534 - RNA, 20 nt, Artificial Sequence
  targeting sequence with TTCN PAM
uauggguggucccgaagguc

SEQ ID NO: 23535 - RNA, 20 nt, Artificial Sequence
  targeting sequence with TTCN PAM
ggaccacccauaggaaucuu

SEQ ID NO: 23536 - RNA, 20 nt, Artificial Sequence
  targeting sequence with TTCN PAM
agcuccccgccccaacccca

SEQ ID NO: 23537 - RNA, 20 nt, Artificial Sequence
  targeting sequence with TTCN PAM
gagaaaugguacauuugccc

SEQ ID NO: 23538 - RNA, 20 nt, Artificial Sequence
  targeting sequence with TTCN PAM
cagaaaaagugggcuggguu

SEQ ID NO: 23539 - RNA, 20 nt, Artificial Sequence
  targeting sequence with TTCN PAM
ucuggacaugaggcuggggc

SEQ ID NO: 23540 - RNA, 20 nt, Artificial Sequence
  targeting sequence with TTCN PAM
gguguuagaguaaaauuuuc

SEQ ID NO: 23541 - RNA, 20 nt, Artificial Sequence
  targeting sequence with TTCN PAM
cugguuuguccugauagaca

SEQ ID NO: 23542 - RNA, 20 nt, Artificial Sequence
  targeting sequence with TTCN PAM
ugucuaucaggacaaaccag

SEQ ID NO: 23543 - RNA, 20 nt, Artificial Sequence
  targeting sequence with TTCN PAM
ugggcacuugcauacauaaa

SEQ ID NO: 23544 - RNA, 20 nt, Artificial Sequence
  targeting sequence with TTCN PAM
cuuuauguaugcaagugccc

SEQ ID NO: 23545 - RNA, 20 nt, Artificial Sequence
  targeting sequence with TTCN PAM
accaaaccugagcaagcuga

SEQ ID NO: 23546 - RNA, 20 nt, Artificial Sequence
  targeting sequence with TTCN PAM
ggcauggggucagcuugcuc

SEQ ID NO: 23547 - RNA, 20 nt, Artificial Sequence
  targeting sequence with TTCN PAM
ucuccgaguccccagugcau

SEQ ID NO: 23548 - RNA, 20 nt, Artificial Sequence
  targeting sequence with TTCN PAM
ggggugcaucucucccuugg

SEQ ID NO: 23549 - RNA, 20 nt, Artificial Sequence
  targeting sequence with TTCN PAM
caacuauguagcuucagggc

SEQ ID NO: 23550 - RNA, 20 nt, Artificial Sequence
  targeting sequence with TTCN PAM
gggcaaguucucuuucuuuc

SEQ ID NO: 23551 - RNA, 20 nt, Artificial Sequence
  targeting sequence with TTCN PAM
cuuucuuucuuuuucuuucu

SEQ ID NO: 23552 - RNA, 20 nt, Artificial Sequence
  targeting sequence with TTCN PAM
uucuuuuucuuucuuucucu

SEQ ID NO: 23553 - RNA, 20 nt, Artificial Sequence
  targeting sequence with TTCN PAM
uuuucuuucuuucucuuucu

SEQ ID NO: 23554 - RNA, 20 nt, Artificial Sequence
  targeting sequence with TTCN PAM
uucuuucucuuucuuucuuu

SEQ ID NO: 23555 - RNA, 20 nt, Artificial Sequence
  targeting sequence with TTCN PAM
uucucuuucuuucuuucuuu

SEQ ID NO: 23556 - RNA, 20 nt, Artificial Sequence
  targeting sequence with TTCN PAM
cuuucuuucuuucuuucuuu

SEQ ID NO: 23557 - RNA, 20 nt, Artificial Sequence
  targeting sequence with TTCN PAM
uucuuucuuucuuucuuucu

SEQ ID NO: 23558 - RNA, 20 nt, Artificial Sequence
  targeting sequence with TTCN PAM
uucuuucuuucuuucuuucu

SEQ ID NO: 23559 - RNA, 20 nt, Artificial Sequence
  targeting sequence with TTCN PAM
uucuuucuuucuuucuuucu

SEQ ID NO: 23560 - RNA, 20 nt, Artificial Sequence
  targeting sequence with TTCN PAM
uucuuucuuucuuucuuucu

SEQ ID NO: 23561 - RNA, 20 nt, Artificial Sequence
  targeting sequence with TTCN PAM
uucuuucuuucuuucuuucu

SEQ ID NO: 23562 - RNA, 20 nt, Artificial Sequence
  targeting sequence with TTCN PAM
uucuuucuuucuuucuuucu

SEQ ID NO: 23563 - RNA, 20 nt, Artificial Sequence
  targeting sequence with TTCN PAM
uucuuucuuucuuucuuucu

SEQ ID NO: 23564 - RNA, 20 nt, Artificial Sequence
  targeting sequence with TTCN PAM
uucuuucuuucuuucuuucu

SEQ ID NO: 23565 - RNA, 20 nt, Artificial Sequence
  targeting sequence with TTCN PAM
uucuuucuuucuuucuuucu

SEQ ID NO: 23566 - RNA, 20 nt, Artificial Sequence
  targeting sequence with TTCN PAM
uucuuucuuucuuucuuucu

SEQ ID NO: 23567 - RNA, 20 nt, Artificial Sequence
  targeting sequence with TTCN PAM
uucuuucuuucuuucuuucu

SEQ ID NO: 23568 - RNA, 20 nt, Artificial Sequence
  targeting sequence with TTCN PAM
uucuuucuuucuuucuuucu

SEQ ID NO: 23569 - RNA, 20 nt, Artificial Sequence
  targeting sequence with TTCN PAM
uucuuucuuucuuucuuucu

SEQ ID NO: 23570 - RNA, 20 nt, Artificial Sequence
  targeting sequence with TTCN PAM
uucuuucuuucuuucuuucu

SEQ ID NO: 23571 - RNA, 20 nt, Artificial Sequence
  targeting sequence with TTCN PAM
uucuuucuuucuuucuuucu

SEQ ID NO: 23572 - RNA, 20 nt, Artificial Sequence
  targeting sequence with TTCN PAM
uucuuucuuucuuucuuugc

SEQ ID NO: 23573 - RNA, 20 nt, Artificial Sequence
  targeting sequence with TTCN PAM
uucuuucuuucuuugcuccu

SEQ ID NO: 23574 - RNA, 20 nt, Artificial Sequence
  targeting sequence with TTCN PAM
uucuuucuuugcuccuuccu

SEQ ID NO: 23575 - RNA, 20 nt, Artificial Sequence
  targeting sequence with TTCN PAM
uucuuugcuccuuccuuccu

SEQ ID NO: 23576 - RNA, 20 nt, Artificial Sequence
  targeting sequence with TTCN PAM
uugcuccuuccuuccuuccu

SEQ ID NO: 23577 - RNA, 20 nt, Artificial Sequence
  targeting sequence with TTCN PAM
uuccuuccuugcuucuuucu

SEQ ID NO: 23578 - RNA, 20 nt, Artificial Sequence
  targeting sequence with TTCN PAM
uuccuugcuucuuucuuucu

SEQ ID NO: 23579 - RNA, 20 nt, Artificial Sequence
  targeting sequence with TTCN PAM
uugcuucuuucuuucuuucu

SEQ ID NO: 23580 - RNA, 20 nt, Artificial Sequence
  targeting sequence with TTCN PAM
uucuuucuuucuucuuuuuc

SEQ ID NO: 23581 - RNA, 20 nt, Artificial Sequence
  targeting sequence with TTCN PAM
uucuuucuucuuuuucuuuu

SEQ ID NO: 23582 - RNA, 20 nt, Artificial Sequence
  targeting sequence with TTCN PAM
uucuucuuuuucuuuucuuu

SEQ ID NO: 23583 - RNA, 20 nt, Artificial Sequence
  targeting sequence with TTCN PAM
ucuuuuucuuuucuuuuuuu

SEQ ID NO: 23584 - RNA, 20 nt, Artificial Sequence
  targeting sequence with TTCN PAM
uuuucuuuucuuuuuuuuuu

SEQ ID NO: 23585 - RNA, 20 nt, Artificial Sequence
  targeting sequence with TTCN PAM
uuucuuuuuuuuuuuugaga

SEQ ID NO: 23586 - RNA, 20 nt, Artificial Sequence
  targeting sequence with TTCN PAM
uuuuuuuuuuugagaugggg

SEQ ID NO: 23587 - RNA, 20 nt, Artificial Sequence
  targeting sequence with TTCN PAM
caguuucaagcaauccuucu

SEQ ID NO: 23588 - RNA, 20 nt, Artificial Sequence
  targeting sequence with TTCN PAM
agcaauccuucugucucagc

SEQ ID NO: 23589 - RNA, 20 nt, Artificial Sequence
  targeting sequence with TTCN PAM
gucucagccucucaaguagc

SEQ ID NO: 23590 - RNA, 20 nt, Artificial Sequence
  targeting sequence with TTCN PAM
aaaccagccugggcaacaua

SEQ ID NO: 23591 - RNA, 20 nt, Artificial Sequence
  targeting sequence with TTCN PAM
agccucaaacgauccuccug

SEQ ID NO: 23592 - RNA, 20 nt, Artificial Sequence
  targeting sequence with TTCN PAM
aggacuugcccaaaccaagu

SEQ ID NO: 23593 - RNA, 20 nt, Artificial Sequence
  targeting sequence with TTCN PAM
cuccuuuauagcugaggggc

SEQ ID NO: 23594 - RNA, 20 nt, Artificial Sequence
  targeting sequence with TTCN PAM
accaagugggauaauucucu

SEQ ID NO: 23595 - RNA, 20 nt, Artificial Sequence
  targeting sequence with TTCN PAM
auaaaugugaauucccuucc

SEQ ID NO: 23596 - RNA, 20 nt, Artificial Sequence
  targeting sequence with TTCN PAM
cauuuauugaaugucuacug

SEQ ID NO: 23597 - RNA, 20 nt, Artificial Sequence
  targeting sequence with TTCN PAM
cuucccagagacaugaacua

SEQ ID NO: 23598 - RNA, 20 nt, Artificial Sequence
  targeting sequence with TTCN PAM
cagagacaugaacuaaguuc

SEQ ID NO: 23599 - RNA, 20 nt, Artificial Sequence
  targeting sequence with TTCN PAM
ugucucugggaagggaauuc

SEQ ID NO: 23600 - RNA, 20 nt, Artificial Sequence
  targeting sequence with TTCN PAM
gaggaggcagccgcuugugu

SEQ ID NO: 23601 - RNA, 20 nt, Artificial Sequence
  targeting sequence with TTCN PAM
caccacacaagcggcugccu

SEQ ID NO: 23602 - RNA, 20 nt, Artificial Sequence
  targeting sequence with TTCN PAM
ccacuuuugcaagacccccc

SEQ ID NO: 23603 - RNA, 20 nt, Artificial Sequence
  targeting sequence with TTCN PAM
uucccuuuccuucuauuaac

SEQ ID NO: 23604 - RNA, 20 nt, Artificial Sequence
  targeting sequence with TTCN PAM
cuuuccuucuauuaacaaua

SEQ ID NO: 23605 - RNA, 20 nt, Artificial Sequence
  targeting sequence with TTCN PAM
uucuauuaacaauaucaucc

SEQ ID NO: 23606 - RNA, 20 nt, Artificial Sequence
  targeting sequence with TTCN PAM
auuaacaauaucauccuagg

SEQ ID NO: 23607 - RNA, 20 nt, Artificial Sequence
  targeting sequence with TTCN PAM
agcugggcaccugguugcuc

SEQ ID NO: 23608 - RNA, 20 nt, Artificial Sequence
  targeting sequence with TTCN PAM
gcuucuuuugcaccuguggu

SEQ ID NO: 23609 - RNA, 20 nt, Artificial Sequence
  targeting sequence with TTCN PAM
uuugcaccugugguggcagg

SEQ ID NO: 23610 - RNA, 20 nt, Artificial Sequence
  targeting sequence with TTCN PAM
gaguacccuacaaugacugg

SEQ ID NO: 23611 - RNA, 20 nt, Artificial Sequence
  targeting sequence with TTCN PAM
ccaaaaugcacaaccuagag

SEQ ID NO: 23612 - RNA, 20 nt, Artificial Sequence
  targeting sequence with TTCN PAM
auucuccaaaaugcacaacc

SEQ ID NO: 23613 - RNA, 20 nt, Artificial Sequence
  targeting sequence with TTCN PAM
ucucaucuuuucuuccugcu

SEQ ID NO: 23614 - RNA, 20 nt, Artificial Sequence
  targeting sequence with TTCN PAM
uccugcuggcuggaaagcag

SEQ ID NO: 23615 - RNA, 20 nt, Artificial Sequence
  targeting sequence with TTCN PAM
ugcuggcuggaaagcaguca

SEQ ID NO: 23616 - RNA, 20 nt, Artificial Sequence
  targeting sequence with TTCN PAM
agccagcaggaagaaaagau

SEQ ID NO: 23617 - RNA, 20 nt, Artificial Sequence
  targeting sequence with TTCN PAM
gcacccauauuagaucauga

SEQ ID NO: 23618 - RNA, 20 nt, Artificial Sequence
  targeting sequence with TTCN PAM
aucucaugaucuaauauggg

SEQ ID NO: 23619 - RNA, 20 nt, Artificial Sequence
  targeting sequence with TTCN PAM
cuguccucagauucuaucuc

SEQ ID NO: 23620 - RNA, 20 nt, Artificial Sequence
  targeting sequence with TTCN PAM
cuggugugucucaccauggu

SEQ ID NO: 23621 - RNA, 20 nt, Artificial Sequence
  targeting sequence with TTCN PAM
cccaugcugccuuaacagcc

SEQ ID NO: 23622 - RNA, 20 nt, Artificial Sequence
  targeting sequence with TTCN PAM
agagggaagaguuucauggu

SEQ ID NO: 23623 - RNA, 20 nt, Artificial Sequence
  targeting sequence with TTCN PAM
cucuugaaacucuuuaagca

SEQ ID NO: 23624 - RNA, 20 nt, Artificial Sequence
  targeting sequence with TTCN PAM
ugguuucuuguuuaagucac

SEQ ID NO: 23625 - RNA, 20 nt, Artificial Sequence
  targeting sequence with TTCN PAM
uguuuaagucacuugugauu

SEQ ID NO: 23626 - RNA, 20 nt, Artificial Sequence
  targeting sequence with TTCN PAM
uuuccuuccuuccuuucccu

SEQ ID NO: 23627 - RNA, 20 nt, Artificial Sequence
  targeting sequence with TTCN PAM
uuccuuccuuucccucccuc

SEQ ID NO: 23628 - RNA, 20 nt, Artificial Sequence
  targeting sequence with TTCN PAM
uuccuuucccucccucccuc

SEQ ID NO: 23629 - RNA, 20 nt, Artificial Sequence
  targeting sequence with TTCN PAM
uuucccucccucccucccuc

SEQ ID NO: 23630 - RNA, 20 nt, Artificial Sequence
  targeting sequence with TTCN PAM
cucccucccucccucccucc

SEQ ID NO: 23631 - RNA, 20 nt, Artificial Sequence
  targeting sequence with TTCN PAM
uuccuuccuuccuuccuucc

SEQ ID NO: 23632 - RNA, 20 nt, Artificial Sequence
  targeting sequence with TTCN PAM
uuccuuccuuccuuccuuuc

SEQ ID NO: 23633 - RNA, 20 nt, Artificial Sequence
  targeting sequence with TTCN PAM
uuccuuccuuccuuuccuuc

SEQ ID NO: 23634 - RNA, 20 nt, Artificial Sequence
  targeting sequence with TTCN PAM
uuccuuccuuuccuucuuuc

SEQ ID NO: 23635 - RNA, 20 nt, Artificial Sequence
  targeting sequence with TTCN PAM
uuccuuuccuucuuucuuuu

SEQ ID NO: 23636 - RNA, 20 nt, Artificial Sequence
  targeting sequence with TTCN PAM
uuuccuucuuucuuuucuga

SEQ ID NO: 23637 - RNA, 20 nt, Artificial Sequence
  targeting sequence with TTCN PAM
uucuuucuuuucugagacag

SEQ ID NO: 23638 - RNA, 20 nt, Artificial Sequence
  targeting sequence with TTCN PAM
uucuuuucugagacagaguc

SEQ ID NO: 23639 - RNA, 20 nt, Artificial Sequence
  targeting sequence with TTCN PAM
uuucugagacagagucuugc

SEQ ID NO: 23640 - RNA, 20 nt, Artificial Sequence
  targeting sequence with TTCN PAM
gagacagagucuugcucuau

SEQ ID NO: 23641 - RNA, 20 nt, Artificial Sequence
  targeting sequence with TTCN PAM
agcaauucuccugccucagc

SEQ ID NO: 23642 - RNA, 20 nt, Artificial Sequence
  targeting sequence with TTCN PAM
ccugccucagccucccgagu

SEQ ID NO: 23643 - RNA, 20 nt, Artificial Sequence
  targeting sequence with TTCN PAM
agaucagccugggcaacaug

SEQ ID NO: 23644 - RNA, 20 nt, Artificial Sequence
  targeting sequence with TTCN PAM
uuacuaaaacaaagggcuuc

SEQ ID NO: 23645 - RNA, 20 nt, Artificial Sequence
  targeting sequence with TTCN PAM
aggcugcagcccaggaacuc

SEQ ID NO: 23646 - RNA, 20 nt, Artificial Sequence
  targeting sequence with TTCN PAM
ugggcugcagccuggaagcc

SEQ ID NO: 23647 - RNA, 20 nt, Artificial Sequence
  targeting sequence with TTCN PAM
ugaguuccugggcugcagcc

SEQ ID NO: 23648 - RNA, 20 nt, Artificial Sequence
  targeting sequence with TTCN PAM
aucuuccugaguuccugggc

SEQ ID NO: 23649 - RNA, 20 nt, Artificial Sequence
  targeting sequence with TTCN PAM
gagaggaccugcacuucgau

SEQ ID NO: 23650 - RNA, 20 nt, Artificial Sequence
  targeting sequence with TTCN PAM
gcuucuccauguauaaauaa

SEQ ID NO: 23651 - RNA, 20 nt, Artificial Sequence
  targeting sequence with TTCN PAM
ccauguauaaauaaaauagu

SEQ ID NO: 23652 - RNA, 20 nt, Artificial Sequence
  targeting sequence with TTCN PAM
cuauuuuauuuauacaugga

SEQ ID NO: 23653 - RNA, 20 nt, Artificial Sequence
  targeting sequence with TTCN PAM
acauccauguaaauauuuua

SEQ ID NO: 23654 - RNA, 20 nt, Artificial Sequence
  targeting sequence with TTCN PAM
accccgcccuuuauauauuu

SEQ ID NO: 23655 - RNA, 20 nt, Artificial Sequence
  targeting sequence with TTCN PAM
ugacuuuuagucaauaaaua

SEQ ID NO: 23656 - RNA, 20 nt, Artificial Sequence
  targeting sequence with TTCN PAM
uuccugacuuuuagucaaua

SEQ ID NO: 23657 - RNA, 20 nt, Artificial Sequence
  targeting sequence with TTCN PAM
aaaaguucagaacugugauc

SEQ ID NO: 23658 - RNA, 20 nt, Artificial Sequence
  targeting sequence with TTCN PAM
gaacugugaucuucagaacu

SEQ ID NO: 23659 - RNA, 20 nt, Artificial Sequence
  targeting sequence with TTCN PAM
gaacuuuuggaagcaguuuu

SEQ ID NO: 23660 - RNA, 20 nt, Artificial Sequence
  targeting sequence with TTCN PAM
gaacuguagggcaguucaca

SEQ ID NO: 23661 - RNA, 20 nt, Artificial Sequence
  targeting sequence with TTCN PAM
gaagaucacaguucugaacu

SEQ ID NO: 23662 - RNA, 20 nt, Artificial Sequence
  targeting sequence with TTCN PAM
cauguaggcugaccccauuc

SEQ ID NO: 23663 - RNA, 20 nt, Artificial Sequence
  targeting sequence with TTCN PAM
guguuucauaacuaguucuc

SEQ ID NO: 23664 - RNA, 20 nt, Artificial Sequence
  targeting sequence with TTCN PAM
uaacuaguucucagcagaag

SEQ ID NO: 23665 - RNA, 20 nt, Artificial Sequence
  targeting sequence with TTCN PAM
cagcagaaguuacauuucau

SEQ ID NO: 23666 - RNA, 20 nt, Artificial Sequence
  targeting sequence with TTCN PAM
gcugagaacuaguuaugaaa

SEQ ID NO: 23667 - RNA, 20 nt, Artificial Sequence
  targeting sequence with TTCN PAM
uacaggccucaguaaaaaau

SEQ ID NO: 23668 - RNA, 20 nt, Artificial Sequence
  targeting sequence with TTCN PAM
gugauuuuuuacugaggccu

SEQ ID NO: 23669 - RNA, 20 nt, Artificial Sequence
  targeting sequence with TTCN PAM
gagcaucagacugcagggac

SEQ ID NO: 23670 - RNA, 20 nt, Artificial Sequence
  targeting sequence with TTCN PAM
cuguaaaaaggcaauccucu

SEQ ID NO: 23671 - RNA, 20 nt, Artificial Sequence
  targeting sequence with TTCN PAM
ucuagaggauugccuuuuua

SEQ ID NO: 23672 - RNA, 20 nt, Artificial Sequence
  targeting sequence with TTCN PAM
ucccuucaaaugcgaaacuu

SEQ ID NO: 23673 - RNA, 20 nt, Artificial Sequence
  targeting sequence with TTCN PAM
cuucaaaugcgaaacuugau

SEQ ID NO: 23674 - RNA, 20 nt, Artificial Sequence
  targeting sequence with TTCN PAM
aaugcgaaacuugauccugg

SEQ ID NO: 23675 - RNA, 20 nt, Artificial Sequence
  targeting sequence with TTCN PAM
cauuugaagggaagaagcuc

SEQ ID NO: 23676 - RNA, 20 nt, Artificial Sequence
  targeting sequence with TTCN PAM
gaagaagcucgugggaaugu

SEQ ID NO: 23677 - RNA, 20 nt, Artificial Sequence
  targeting sequence with TTCN PAM
gaaaccaugcucccggcugu

SEQ ID NO: 23678 - RNA, 20 nt, Artificial Sequence
  targeting sequence with TTCN PAM
uccgaaaccaugcucccggc

SEQ ID NO: 23679 - RNA, 20 nt, Artificial Sequence
  targeting sequence with TTCN PAM
cacgagcuucuuccgaaacc

SEQ ID NO: 23680 - RNA, 20 nt, Artificial Sequence
  targeting sequence with TTCN PAM
aucacugaguguugcucuac

SEQ ID NO: 23681 - RNA, 20 nt, Artificial Sequence
  targeting sequence with TTCN PAM
caguucuuggaaguguccca

SEQ ID NO: 23682 - RNA, 20 nt, Artificial Sequence
  targeting sequence with TTCN PAM
uggaagugucccauaaaugu

SEQ ID NO: 23683 - RNA, 20 nt, Artificial Sequence
  targeting sequence with TTCN PAM
aagaacugagaaguagagca

SEQ ID NO: 23684 - RNA, 20 nt, Artificial Sequence
  targeting sequence with TTCN PAM
auuugccucuuugcuucguc

SEQ ID NO: 23685 - RNA, 20 nt, Artificial Sequence
  targeting sequence with TTCN PAM
ucuucugcuccagcauaguc

SEQ ID NO: 23686 - RNA, 20 nt, Artificial Sequence
  targeting sequence with TTCN PAM
gcuccagcauagucccggaa

SEQ ID NO: 23687 - RNA, 20 nt, Artificial Sequence
  targeting sequence with TTCN PAM
gggacuaugcuggagcagaa

SEQ ID NO: 23688 - RNA, 20 nt, Artificial Sequence
  targeting sequence with TTCN PAM
ggccuccagcacugggaccu

SEQ ID NO: 23689 - RNA, 20 nt, Artificial Sequence
  targeting sequence with TTCN PAM
uggugguaucccuggugccc

SEQ ID NO: 23690 - RNA, 20 nt, Artificial Sequence
  targeting sequence with TTCN PAM
gugucuccagccuuugcgcu

SEQ ID NO: 23691 - RNA, 20 nt, Artificial Sequence
  targeting sequence with TTCN PAM
gagcgcuugaggcucuccag

SEQ ID NO: 23692 - RNA, 20 nt, Artificial Sequence
  targeting sequence with TTCN PAM
agaggccagggaaggcuuuu

SEQ ID NO: 23693 - RNA, 20 nt, Artificial Sequence
  targeting sequence with TTCN PAM
cuggccucuagaagguuagg

SEQ ID NO: 23694 - RNA, 20 nt, Artificial Sequence
  targeting sequence with TTCN PAM
gaagaugcggcaucuacucu

SEQ ID NO: 23695 - RNA, 20 nt, Artificial Sequence
  targeting sequence with TTCN PAM
gaaaagccuucccuggccuc

SEQ ID NO: 23696 - RNA, 20 nt, Artificial Sequence
  targeting sequence with TTCN PAM
cacucaucuuuuggccucag

SEQ ID NO: 23697 - RNA, 20 nt, Artificial Sequence
  targeting sequence with TTCN PAM
cuggacucuuucccacucau

SEQ ID NO: 23698 - RNA, 20 nt, Artificial Sequence
  targeting sequence with TTCN PAM
aaggccaaguguaucaauug

SEQ ID NO: 23699 - RNA, 20 nt, Artificial Sequence
  targeting sequence with TTCN PAM
uggcuuaaaacaacaagcug

SEQ ID NO: 23700 - RNA, 20 nt, Artificial Sequence
  targeting sequence with TTCN PAM
ugacucuggaucagccaggc

SEQ ID NO: 23701 - RNA, 20 nt, Artificial Sequence
  targeting sequence with TTCN PAM
gaucagcagaucugccuggc

SEQ ID NO: 23702 - RNA, 20 nt, Artificial Sequence
  targeting sequence with TTCN PAM
gcuggguucauucaagcauc

SEQ ID NO: 23703 - RNA, 20 nt, Artificial Sequence
  targeting sequence with TTCN PAM
uucaagcaucuguggucaac

SEQ ID NO: 23704 - RNA, 20 nt, Artificial Sequence
  targeting sequence with TTCN PAM
agcaucuguggucaacugga

SEQ ID NO: 23705 - RNA, 20 nt, Artificial Sequence
  targeting sequence with TTCN PAM
gcuauuggucaaagcaaguc

SEQ ID NO: 23706 - RNA, 20 nt, Artificial Sequence
  targeting sequence with TTCN PAM
uuaaaucuuaugacuugcuu

SEQ ID NO: 23707 - RNA, 20 nt, Artificial Sequence
  targeting sequence with TTCN PAM
uaagucugaguggauuccuu

SEQ ID NO: 23708 - RNA, 20 nt, Artificial Sequence
  targeting sequence with TTCN PAM
agaccagccugggcaacaug

SEQ ID NO: 23709 - RNA, 20 nt, Artificial Sequence
  targeting sequence with TTCN PAM
aauauauauacauacauaua

SEQ ID NO: 23710 - RNA, 20 nt, Artificial Sequence
  targeting sequence with TTCN PAM
aaguggcuaggacucaggca

SEQ ID NO: 23711 - RNA, 20 nt, Artificial Sequence
  targeting sequence with TTCN PAM
gucuuccaaguggcuaggac

SEQ ID NO: 23712 - RNA, 20 nt, Artificial Sequence
  targeting sequence with TTCN PAM
gggcucaagugaucuccuac

SEQ ID NO: 23713 - RNA, 20 nt, Artificial Sequence
  targeting sequence with TTCN PAM
acucugucgcccaggcugga

SEQ ID NO: 23714 - RNA, 20 nt, Artificial Sequence
  targeting sequence with TTCN PAM
uguuuguuuguuuguuuuuu

SEQ ID NO: 23715 - RNA, 20 nt, Artificial Sequence
  targeting sequence with TTCN PAM
cuccugcccauuugcaaugu

SEQ ID NO: 23716 - RNA, 20 nt, Artificial Sequence
  targeting sequence with TTCN PAM
gcaucaauucaacacacaca

SEQ ID NO: 23717 - RNA, 20 nt, Artificial Sequence
  targeting sequence with TTCN PAM
acacacacagaggagacaaa

SEQ ID NO: 23718 - RNA, 20 nt, Artificial Sequence
  targeting sequence with TTCN PAM
aggagccgcaguguggguga

SEQ ID NO: 23719 - RNA, 20 nt, Artificial Sequence
  targeting sequence with TTCN PAM
cccacacugcggcuccugga

SEQ ID NO: 23720 - RNA, 20 nt, Artificial Sequence
  targeting sequence with TTCN PAM
agcggggaggaggcuccuua

SEQ ID NO: 23721 - RNA, 20 nt, Artificial Sequence
  targeting sequence with TTCN PAM
gucugacuuaaggagccucc

SEQ ID NO: 23722 - RNA, 20 nt, Artificial Sequence
  targeting sequence with TTCN PAM
ugcucuucagucugacuuaa

SEQ ID NO: 23723 - RNA, 20 nt, Artificial Sequence
  targeting sequence with TTCN PAM
cccacgggcaguggggagcc

SEQ ID NO: 23724 - RNA, 20 nt, Artificial Sequence
  targeting sequence with TTCN PAM
cucccccgcuuagcauccug

SEQ ID NO: 23725 - RNA, 20 nt, Artificial Sequence
  targeting sequence with TTCN PAM
cuuuagaacacuuugaugac

SEQ ID NO: 23726 - RNA, 20 nt, Artificial Sequence
  targeting sequence with TTCN PAM
aaagugaagucagauuucac

SEQ ID NO: 23727 - RNA, 20 nt, Artificial Sequence
  targeting sequence with TTCN PAM
cagagggcucuccaucacca

SEQ ID NO: 23728 - RNA, 20 nt, Artificial Sequence
  targeting sequence with TTCN PAM
acaauaaagagacuaccuag

SEQ ID NO: 23729 - RNA, 20 nt, Artificial Sequence
  targeting sequence with TTCN PAM
cuagguagucucuuuauugu

SEQ ID NO: 23730 - RNA, 20 nt, Artificial Sequence
  targeting sequence with TTCN PAM
ucucuagguagucucuuuau

SEQ ID NO: 23731 - RNA, 20 nt, Artificial Sequence
  targeting sequence with TTCN PAM
ucagagguaaccacuucuac

SEQ ID NO: 23732 - RNA, 20 nt, Artificial Sequence
  targeting sequence with TTCN PAM
acuauuaccuugguaugaau

SEQ ID NO: 23733 - RNA, 20 nt, Artificial Sequence
  targeting sequence with TTCN PAM
uaccaagguaauaguagaag

SEQ ID NO: 23734 - RNA, 20 nt, Artificial Sequence
  targeting sequence with TTCN PAM
gaacuuuuuucuacugcuug

SEQ ID NO: 23735 - RNA, 20 nt, Artificial Sequence
  targeting sequence with TTCN PAM
gaauggauucauaccaaggu

SEQ ID NO: 23736 - RNA, 20 nt, Artificial Sequence
  targeting sequence with TTCN PAM
acugcuugugacugguaaga

SEQ ID NO: 23737 - RNA, 20 nt, Artificial Sequence
  targeting sequence with TTCN PAM
uuuuaauuuuuaaaaaauuu

SEQ ID NO: 23738 - RNA, 20 nt, Artificial Sequence
  targeting sequence with TTCN PAM
cacacacacacacacacaca

SEQ ID NO: 23739 - RNA, 20 nt, Artificial Sequence
  targeting sequence with TTCN PAM
caguaguugggguguacucu

SEQ ID NO: 23740 - RNA, 20 nt, Artificial Sequence
  targeting sequence with TTCN PAM
gguucacuccuuuucacuac

SEQ ID NO: 23741 - RNA, 20 nt, Artificial Sequence
  targeting sequence with TTCN PAM
cuccuuuucacuacugcaua

SEQ ID NO: 23742 - RNA, 20 nt, Artificial Sequence
  targeting sequence with TTCN PAM
cuacugcauacuacuccacu

SEQ ID NO: 23743 - RNA, 20 nt, Artificial Sequence
  targeting sequence with TTCN PAM
cacaguggaguaguaugcag

SEQ ID NO: 23744 - RNA, 20 nt, Artificial Sequence
  targeting sequence with TTCN PAM
cucuccaccugaugggcauu

SEQ ID NO: 23745 - RNA, 20 nt, Artificial Sequence
  targeting sequence with TTCN PAM
aaacaacauaaaugcccauc

SEQ ID NO: 23746 - RNA, 20 nt, Artificial Sequence
  targeting sequence with TTCN PAM
gcuaagauugaaauaaacau

SEQ ID NO: 23747 - RNA, 20 nt, Artificial Sequence
  targeting sequence with TTCN PAM
aucuuagcagaaauucaaaa

SEQ ID NO: 23748 - RNA, 20 nt, Artificial Sequence
  targeting sequence with TTCN PAM
acucuaggcguagaucugag

SEQ ID NO: 23749 - RNA, 20 nt, Artificial Sequence
  targeting sequence with TTCN PAM
uacaacuaaggagggacuca

SEQ ID NO: 23750 - RNA, 20 nt, Artificial Sequence
  targeting sequence with TTCN PAM
gcgauguuucauacaacuaa

SEQ ID NO: 23751 - RNA, 20 nt, Artificial Sequence
  targeting sequence with TTCN PAM
aaggcggcuaccagcucacu

SEQ ID NO: 23752 - RNA, 20 nt, Artificial Sequence
  targeting sequence with TTCN PAM
uugaauccuagucacucacu

SEQ ID NO: 23753 - RNA, 20 nt, Artificial Sequence
  targeting sequence with TTCN PAM
aggaaaguauagcugcuggg

SEQ ID NO: 23754 - RNA, 20 nt, Artificial Sequence
  targeting sequence with TTCN PAM
cacucagcaaaaugacaaag

SEQ ID NO: 23755 - RNA, 20 nt, Artificial Sequence
  targeting sequence with TTCN PAM
uguuuguuuucuuuucuuuc

SEQ ID NO: 23756 - RNA, 20 nt, Artificial Sequence
  targeting sequence with TTCN PAM
uuucuuucccucccccuuuu

SEQ ID NO: 23757 - RNA, 20 nt, Artificial Sequence
  targeting sequence with TTCN PAM
uucccucccccuuuuuuuug

SEQ ID NO: 23758 - RNA, 20 nt, Artificial Sequence
  targeting sequence with TTCN PAM
cucccccuuuuuuuuggggg

SEQ ID NO: 23759 - RNA, 20 nt, Artificial Sequence
  targeting sequence with TTCN PAM
cuuuuuugccuaggcugguc

SEQ ID NO: 23760 - RNA, 20 nt, Artificial Sequence
  targeting sequence with TTCN PAM
agaccagccuaggcaaaaaa

SEQ ID NO: 23761 - RNA, 20 nt, Artificial Sequence
  targeting sequence with TTCN PAM
ggaggcugaggcaggaggau

SEQ ID NO: 23762 - RNA, 20 nt, Artificial Sequence
  targeting sequence with TTCN PAM
gggauuacagguaugagcca

SEQ ID NO: 23763 - RNA, 20 nt, Artificial Sequence
  targeting sequence with TTCN PAM
cucuuguugcccaggcugga

SEQ ID NO: 23764 - RNA, 20 nt, Artificial Sequence
  targeting sequence with TTCN PAM
cugcagucuccagcucccag

SEQ ID NO: 23765 - RNA, 20 nt, Artificial Sequence
  targeting sequence with TTCN PAM
agugauucuccugccucagc

SEQ ID NO: 23766 - RNA, 20 nt, Artificial Sequence
  targeting sequence with TTCN PAM
ccugccucagccucccaagu

SEQ ID NO: 23767 - RNA, 20 nt, Artificial Sequence
  targeting sequence with TTCN PAM
ucucuacuaaaaauacaaaa

SEQ ID NO: 23768 - RNA, 20 nt, Artificial Sequence
  targeting sequence with TTCN PAM
gcagccaucuaaaaugacaa

SEQ ID NO: 23769 - RNA, 20 nt, Artificial Sequence
  targeting sequence with TTCN PAM
gcagaaagggugugauuuag

SEQ ID NO: 23770 - RNA, 20 nt, Artificial Sequence
  targeting sequence with TTCN PAM
gcagaauauucugcagccau

SEQ ID NO: 23771 - RNA, 20 nt, Artificial Sequence
  targeting sequence with TTCN PAM
aagcaaacacccaaggccug

SEQ ID NO: 23772 - RNA, 20 nt, Artificial Sequence
  targeting sequence with TTCN PAM
caucaaauugacagacaaaa

SEQ ID NO: 23773 - RNA, 20 nt, Artificial Sequence
  targeting sequence with TTCN PAM
ccauuguuucaauuugaauu

SEQ ID NO: 23774 - RNA, 20 nt, Artificial Sequence
  targeting sequence with TTCN PAM
auuugaauuuucucaaaugc

SEQ ID NO: 23775 - RNA, 20 nt, Artificial Sequence
  targeting sequence with TTCN PAM
aauugaaacaauggugaaau

SEQ ID NO: 23776 - RNA, 20 nt, Artificial Sequence
  targeting sequence with TTCN PAM
caaaugccaaggaaguugag

SEQ ID NO: 23777 - RNA, 20 nt, Artificial Sequence
  targeting sequence with TTCN PAM
uuggcauuugagaaaauuca

SEQ ID NO: 23778 - RNA, 20 nt, Artificial Sequence
  targeting sequence with TTCN PAM
uguuucuguuccucacccuu

SEQ ID NO: 23779 - RNA, 20 nt, Artificial Sequence
  targeting sequence with TTCN PAM
guuccucacccuuuaggcug

SEQ ID NO: 23780 - RNA, 20 nt, Artificial Sequence
  targeting sequence with TTCN PAM
ucacccuuuaggcuggugaa

SEQ ID NO: 23781 - RNA, 20 nt, Artificial Sequence
  targeting sequence with TTCN PAM
ccagccuaaagggugaggaa

SEQ ID NO: 23782 - RNA, 20 nt, Artificial Sequence
  targeting sequence with TTCN PAM
uuguccauugucccagugga

SEQ ID NO: 23783 - RNA, 20 nt, Artificial Sequence
  targeting sequence with TTCN PAM
uagauaaggacaacauccac

SEQ ID NO: 23784 - RNA, 20 nt, Artificial Sequence
  targeting sequence with TTCN PAM
caaaagucuucauagauaag

SEQ ID NO: 23785 - RNA, 20 nt, Artificial Sequence
  targeting sequence with TTCN PAM
uuaaaaacaaaaccaaagga

SEQ ID NO: 23786 - RNA, 20 nt, Artificial Sequence
  targeting sequence with TTCN PAM
gaggccagccaggcucucug

SEQ ID NO: 23787 - RNA, 20 nt, Artificial Sequence
  targeting sequence with TTCN PAM
caaaaaguagcaguuggagg

SEQ ID NO: 23788 - RNA, 20 nt, Artificial Sequence
  targeting sequence with TTCN PAM
ucaucagcaucuccagcccc

SEQ ID NO: 23789 - RNA, 20 nt, Artificial Sequence
  targeting sequence with TTCN PAM
cugggucucaguccccaugg

SEQ ID NO: 23790 - RNA, 20 nt, Artificial Sequence
  targeting sequence with TTCN PAM
guagggagccccagcuggac

SEQ ID NO: 23791 - RNA, 20 nt, Artificial Sequence
  targeting sequence with TTCN PAM
acaccuccagccccagucag

SEQ ID NO: 23792 - RNA, 20 nt, Artificial Sequence
  targeting sequence with TTCN PAM
acagcaggaucauccagguc

SEQ ID NO: 23793 - RNA, 20 nt, Artificial Sequence
  targeting sequence with TTCN PAM
ggagaccuggaugauccugc

SEQ ID NO: 23794 - RNA, 20 nt, Artificial Sequence
  targeting sequence with TTCN PAM
gauucaggagaccuggauga

SEQ ID NO: 23795 - RNA, 20 nt, Artificial Sequence
  targeting sequence with TTCN PAM
cguucuuucccagccuggcc

SEQ ID NO: 23796 - RNA, 20 nt, Artificial Sequence
  targeting sequence with TTCN PAM
uucccagccuggccccagca

SEQ ID NO: 23797 - RNA, 20 nt, Artificial Sequence
  targeting sequence with TTCN PAM
cagccuggccccagcaccua

SEQ ID NO: 23798 - RNA, 20 nt, Artificial Sequence
  targeting sequence with TTCN PAM
gccaaaaggcaguugagcuc

SEQ ID NO: 23799 - RNA, 20 nt, Artificial Sequence
  targeting sequence with TTCN PAM
cugagcgaggccggccccag

SEQ ID NO: 23800 - RNA, 20 nt, Artificial Sequence
  targeting sequence with TTCN PAM
agcuggagcccguuuccugc

SEQ ID NO: 23801 - RNA, 20 nt, Artificial Sequence
  targeting sequence with TTCN PAM
ugcugggaccguagcccgua

SEQ ID NO: 23802 - RNA, 20 nt, Artificial Sequence
  targeting sequence with TTCN PAM
gauuuucaaccaaaaaacac

SEQ ID NO: 23803 - RNA, 20 nt, Artificial Sequence
  targeting sequence with TTCN PAM
accaaaaaacaccucagggu

SEQ ID NO: 23804 - RNA, 20 nt, Artificial Sequence
  targeting sequence with TTCN PAM
cucccucgaggaccucccgg

SEQ ID NO: 23805 - RNA, 20 nt, Artificial Sequence
  targeting sequence with TTCN PAM
ccaucagaccgggagguccu

SEQ ID NO: 23806 - RNA, 20 nt, Artificial Sequence
  targeting sequence with TTCN PAM
guggcgguaauccagagcug

SEQ ID NO: 23807 - RNA, 20 nt, Artificial Sequence
  targeting sequence with TTCN PAM
cugaccucccagaguggguu

SEQ ID NO: 23808 - RNA, 20 nt, Artificial Sequence
  targeting sequence with TTCN PAM
uagaagaggugacccugaag

SEQ ID NO: 23809 - RNA, 20 nt, Artificial Sequence
  targeting sequence with TTCN PAM
aggaagcuuucccugaccuc

SEQ ID NO: 23810 - RNA, 20 nt, Artificial Sequence
  targeting sequence with TTCN PAM
gggucaccucuucuaggaag

SEQ ID NO: 23811 - RNA, 20 nt, Artificial Sequence
  targeting sequence with TTCN PAM
cccggcugaggcacacccau

SEQ ID NO: 23812 - RNA, 20 nt, Artificial Sequence
  targeting sequence with TTCN PAM
auuugccaagacaccuaggg

SEQ ID NO: 23813 - RNA, 20 nt, Artificial Sequence
  targeting sequence with TTCN PAM
cggcaccuggacccccuccc

SEQ ID NO: 23814 - RNA, 20 nt, Artificial Sequence
  targeting sequence with TTCN PAM
caguuaacucugcccuuuua

SEQ ID NO: 23815 - RNA, 20 nt, Artificial Sequence
  targeting sequence with TTCN PAM
aggcucaaaaugcaccuugg

SEQ ID NO: 23816 - RNA, 20 nt, Artificial Sequence
  targeting sequence with TTCN PAM
ucugccugggcugccucucu

SEQ ID NO: 23817 - RNA, 20 nt, Artificial Sequence
  targeting sequence with TTCN PAM
gagacaagcugcuggugcgc

SEQ ID NO: 23818 - RNA, 20 nt, Artificial Sequence
  targeting sequence with TTCN PAM
uucugggaaggagggaagug

SEQ ID NO: 23819 - RNA, 20 nt, Artificial Sequence
  targeting sequence with TTCN PAM
gggaaggagggaagugcugg

SEQ ID NO: 23820 - RNA, 20 nt, Artificial Sequence
  targeting sequence with TTCN PAM
cagaaggaagaugcagcuuc

SEQ ID NO: 23821 - RNA, 20 nt, Artificial Sequence
  targeting sequence with TTCN PAM
cuccuucccagaaggaagau

SEQ ID NO: 23822 - RNA, 20 nt, Artificial Sequence
  targeting sequence with TTCN PAM
guuaggucaacuuuuaucuu

SEQ ID NO: 23823 - RNA, 20 nt, Artificial Sequence
  targeting sequence with TTCN PAM
agauaaaaguugaccuaacu

SEQ ID NO: 23824 - RNA, 20 nt, Artificial Sequence
  targeting sequence with TTCN PAM
agcagggaggugaggggugu

SEQ ID NO: 23825 - RNA, 20 nt, Artificial Sequence
  targeting sequence with TTCN PAM
ccucgcuguaucucacaccc

SEQ ID NO: 23826 - RNA, 20 nt, Artificial Sequence
  targeting sequence with TTCN PAM
ccaccgcaugcauucuccuc

SEQ ID NO: 23827 - RNA, 20 nt, Artificial Sequence
  targeting sequence with TTCN PAM
ggccucuccucuccaacucc

SEQ ID NO: 23828 - RNA, 20 nt, Artificial Sequence
  targeting sequence with TTCN PAM
cuccauauucuggccucucc

SEQ ID NO: 23829 - RNA, 20 nt, Artificial Sequence
  targeting sequence with TTCN PAM
uccucaccacacccacucga

SEQ ID NO: 23830 - RNA, 20 nt, Artificial Sequence
  targeting sequence with TTCN PAM
gggcccuuuccuccucacca

SEQ ID NO: 23831 - RNA, 20 nt, Artificial Sequence
  targeting sequence with TTCN PAM
ugcuuggauguuggguaggu

SEQ ID NO: 23832 - RNA, 20 nt, Artificial Sequence
  targeting sequence with TTCN PAM
uggaagagagaggaggggca

SEQ ID NO: 23833 - RNA, 20 nt, Artificial Sequence
  targeting sequence with TTCN PAM
aggaaugccccaugccccca

SEQ ID NO: 23834 - RNA, 20 nt, Artificial Sequence
  targeting sequence with TTCN PAM
ggacauccugguauacagca

SEQ ID NO: 23835 - RNA, 20 nt, Artificial Sequence
  targeting sequence with TTCN PAM
augccugcuguauaccagga

SEQ ID NO: 23836 - RNA, 20 nt, Artificial Sequence
  targeting sequence with TTCN PAM
gcagcuauuccaugccugcu

SEQ ID NO: 23837 - RNA, 20 nt, Artificial Sequence
  targeting sequence with TTCN PAM
cucucaucccagccccucau

SEQ ID NO: 23838 - RNA, 20 nt, Artificial Sequence
  targeting sequence with TTCN PAM
cccagaccaugucuguccca

SEQ ID NO: 23839 - RNA, 20 nt, Artificial Sequence
  targeting sequence with TTCN PAM
cgagcagcuccaaccccucc

SEQ ID NO: 23840 - RNA, 20 nt, Artificial Sequence
  targeting sequence with TTCN PAM
cuuggccugacuucacgagc

SEQ ID NO: 23841 - RNA, 20 nt, Artificial Sequence
  targeting sequence with TTCN PAM
caagggucuucgcuuggccu

SEQ ID NO: 23842 - RNA, 20 nt, Artificial Sequence
  targeting sequence with TTCN PAM
cauccguacaguggggacgg

SEQ ID NO: 23843 - RNA, 20 nt, Artificial Sequence
  targeting sequence with TTCN PAM
cucuaggccucagucuuccc

SEQ ID NO: 23844 - RNA, 20 nt, Artificial Sequence
  targeting sequence with TTCN PAM
ucccucuaggccucagucuu

SEQ ID NO: 23845 - RNA, 20 nt, Artificial Sequence
  targeting sequence with TTCN PAM
uucuucccucuaggccucag

SEQ ID NO: 23846 - RNA, 20 nt, Artificial Sequence
  targeting sequence with TTCN PAM
cgggaguuucauucuucccu

SEQ ID NO: 23847 - RNA, 20 nt, Artificial Sequence
  targeting sequence with TTCN PAM
uuugggggccaaaggcguug

SEQ ID NO: 23848 - RNA, 20 nt, Artificial Sequence
  targeting sequence with TTCN PAM
cacacugggcucgucauggc

SEQ ID NO: 23849 - RNA, 20 nt, Artificial Sequence
  targeting sequence with TTCN PAM
accccuguuggguccuggcc

SEQ ID NO: 23850 - RNA, 20 nt, Artificial Sequence
  targeting sequence with TTCN PAM
ugguuuuuuuuuucuauuga

SEQ ID NO: 23851 - RNA, 20 nt, Artificial Sequence
  targeting sequence with TTCN PAM
auugaaaaaaaauuuuaaua

SEQ ID NO: 23852 - RNA, 20 nt, Artificial Sequence
  targeting sequence with TTCN PAM
auagaaaaaaaaaaccauga

SEQ ID NO: 23853 - RNA, 20 nt, Artificial Sequence
  targeting sequence with TTCN PAM
caggcucaagcaaucuuccc

SEQ ID NO: 23854 - RNA, 20 nt, Artificial Sequence
  targeting sequence with TTCN PAM
caccucagccucccaaguag

SEQ ID NO: 23855 - RNA, 20 nt, Artificial Sequence
  targeting sequence with TTCN PAM
uagagucgaggucucacgau

SEQ ID NO: 23856 - RNA, 20 nt, Artificial Sequence
  targeting sequence with TTCN PAM
gggcaauaucgugagaccuc

SEQ ID NO: 23857 - RNA, 20 nt, Artificial Sequence
  targeting sequence with TTCN PAM
gcagauugaucagaaaucaa

SEQ ID NO: 23858 - RNA, 20 nt, Artificial Sequence
  targeting sequence with TTCN PAM
gaucaaucugcagaauuuaa

SEQ ID NO: 23859 - RNA, 20 nt, Artificial Sequence
  targeting sequence with TTCN PAM
auucaccacauuuaaauccg

SEQ ID NO: 23860 - RNA, 20 nt, Artificial Sequence
  targeting sequence with TTCN PAM
ccacauuuaaauccgguuuc

SEQ ID NO: 23861 - RNA, 20 nt, Artificial Sequence
  targeting sequence with TTCN PAM
uauuuaaaucccuuuuaugc

SEQ ID NO: 23862 - RNA, 20 nt, Artificial Sequence
  targeting sequence with TTCN PAM
uggugacugacaacuucuca

SEQ ID NO: 23863 - RNA, 20 nt, Artificial Sequence
  targeting sequence with TTCN PAM
caugcuucccccacccuuga

SEQ ID NO: 23864 - RNA, 20 nt, Artificial Sequence
  targeting sequence with TTCN PAM
cccacccuugaucccacuuc

SEQ ID NO: 23865 - RNA, 20 nt, Artificial Sequence
  targeting sequence with TTCN PAM
uuugcaacuauuuuauaaca

SEQ ID NO: 23866 - RNA, 20 nt, Artificial Sequence
  targeting sequence with TTCN PAM
caauaagguguuauaaaaua

SEQ ID NO: 23867 - RNA, 20 nt, Artificial Sequence
  targeting sequence with TTCN PAM
cauacaauacaauucacccu

SEQ ID NO: 23868 - RNA, 20 nt, Artificial Sequence
  targeting sequence with TTCN PAM
cccuuuaaaguguacaaugg

SEQ ID NO: 23869 - RNA, 20 nt, Artificial Sequence
  targeting sequence with TTCN PAM
aaaauugauuauagagaugg

SEQ ID NO: 23870 - RNA, 20 nt, Artificial Sequence
  targeting sequence with TTCN PAM
ucacuucaagaaaaccagua

SEQ ID NO: 23871 - RNA, 20 nt, Artificial Sequence
  targeting sequence with TTCN PAM
agaaaaccaguacccauuag

SEQ ID NO: 23872 - RNA, 20 nt, Artificial Sequence
  targeting sequence with TTCN PAM
ugaagugaugaaaauauucu

SEQ ID NO: 23873 - RNA, 20 nt, Artificial Sequence
  targeting sequence with TTCN PAM
gcaucuauggacuucuuauu

SEQ ID NO: 23874 - RNA, 20 nt, Artificial Sequence
  targeting sequence with TTCN PAM
uauucuggacauuucauaua

SEQ ID NO: 23875 - RNA, 20 nt, Artificial Sequence
  targeting sequence with TTCN PAM
ggacauuucauauaaaugga

SEQ ID NO: 23876 - RNA, 20 nt, Artificial Sequence
  targeting sequence with TTCN PAM
uauaaauggaaucagacagu

SEQ ID NO: 23877 - RNA, 20 nt, Artificial Sequence
  targeting sequence with TTCN PAM
auuuauaugaaauguccaga

SEQ ID NO: 23878 - RNA, 20 nt, Artificial Sequence
  targeting sequence with TTCN PAM
gacugccuuuuuucacuuug

SEQ ID NO: 23879 - RNA, 20 nt, Artificial Sequence
  targeting sequence with TTCN PAM
cuuugcauguuucagggcuc

SEQ ID NO: 23880 - RNA, 20 nt, Artificial Sequence
  targeting sequence with TTCN PAM
gggcuccuccaugucguagc

SEQ ID NO: 23881 - RNA, 20 nt, Artificial Sequence
  targeting sequence with TTCN PAM
cuccuuuguauggcuggaua

SEQ ID NO: 23882 - RNA, 20 nt, Artificial Sequence
  targeting sequence with TTCN PAM
acgggauggguagcgaccac

SEQ ID NO: 23883 - RNA, 20 nt, Artificial Sequence
  targeting sequence with TTCN PAM
uccaucugucaaucauucau

SEQ ID NO: 23884 - RNA, 20 nt, Artificial Sequence
  targeting sequence with TTCN PAM
ucauggauguuugggcuggu

SEQ ID NO: 23885 - RNA, 20 nt, Artificial Sequence
  targeting sequence with TTCN PAM
aucuuugggccgacaugaau

SEQ ID NO: 23886 - RNA, 20 nt, Artificial Sequence
  targeting sequence with TTCN PAM
ugucggcccaaagauggaac

SEQ ID NO: 23887 - RNA, 20 nt, Artificial Sequence
  targeting sequence with TTCN PAM
uagcagcacuauucaugucg

SEQ ID NO: 23888 - RNA, 20 nt, Artificial Sequence
  targeting sequence with TTCN PAM
uguguacauuuuugugugga

SEQ ID NO: 23889 - RNA, 20 nt, Artificial Sequence
  targeting sequence with TTCN PAM
uuucccucagguauauaccg

SEQ ID NO: 23890 - RNA, 20 nt, Artificial Sequence
  targeting sequence with TTCN PAM
cucagguauauaccgaagag

SEQ ID NO: 23891 - RNA, 20 nt, Artificial Sequence
  targeting sequence with TTCN PAM
guauauaccugagggaaaug

SEQ ID NO: 23892 - RNA, 20 nt, Artificial Sequence
  targeting sequence with TTCN PAM
acucuucgguauauaccuga

SEQ ID NO: 23893 - RNA, 20 nt, Artificial Sequence
  targeting sequence with TTCN PAM
uaauaaaaaguuaccaaaaa

SEQ ID NO: 23894 - RNA, 20 nt, Artificial Sequence
  targeting sequence with TTCN PAM
gggccgagcaugguggcuca

SEQ ID NO: 23895 - RNA, 20 nt, Artificial Sequence
  targeting sequence with TTCN PAM
caccucagucucccaaagug

SEQ ID NO: 23896 - RNA, 20 nt, Artificial Sequence
  targeting sequence with TTCN PAM
agcuaucuucccaccucagu

SEQ ID NO: 23897 - RNA, 20 nt, Artificial Sequence
  targeting sequence with TTCN PAM
gagacugaggcaagaggauc

SEQ ID NO: 23898 - RNA, 20 nt, Artificial Sequence
  targeting sequence with TTCN PAM
aauggauacaaaaguagacu

SEQ ID NO: 23899 - RNA, 20 nt, Artificial Sequence
  targeting sequence with TTCN PAM
acuguacccgucacccagcu

SEQ ID NO: 23900 - RNA, 20 nt, Artificial Sequence
  targeting sequence with TTCN PAM
ucugcuggguuauuucaaag

SEQ ID NO: 23901 - RNA, 20 nt, Artificial Sequence
  targeting sequence with TTCN PAM
aagcaaaugcuggauuuaug

SEQ ID NO: 23902 - RNA, 20 nt, Artificial Sequence
  targeting sequence with TTCN PAM
ucuguaaauaucuuuuauaa

SEQ ID NO: 23903 - RNA, 20 nt, Artificial Sequence
  targeting sequence with TTCN PAM
agugugcuaaugguauuaca

SEQ ID NO: 23904 - RNA, 20 nt, Artificial Sequence
  targeting sequence with TTCN PAM
uuccagugcucacauuuauc

SEQ ID NO: 23905 - RNA, 20 nt, Artificial Sequence
  targeting sequence with TTCN PAM
agugcucacauuuaucuguu

SEQ ID NO: 23906 - RNA, 20 nt, Artificial Sequence
  targeting sequence with TTCN PAM
uuuuccaguuggauuguuca

SEQ ID NO: 23907 - RNA, 20 nt, Artificial Sequence
  targeting sequence with TTCN PAM
aguuggauuguucaaauccu

SEQ ID NO: 23908 - RNA, 20 nt, Artificial Sequence
  targeting sequence with TTCN PAM
aauccugcucugggaaugag

SEQ ID NO: 23909 - RNA, 20 nt, Artificial Sequence
  targeting sequence with TTCN PAM
cagagcaggauuugaacaau

SEQ ID NO: 23910 - RNA, 20 nt, Artificial Sequence
  targeting sequence with TTCN PAM
uaaggaccuuuaguccauag

SEQ ID NO: 23911 - RNA, 20 nt, Artificial Sequence
  targeting sequence with TTCN PAM
uuccccccuuauuuguggaa

SEQ ID NO: 23912 - RNA, 20 nt, Artificial Sequence
  targeting sequence with TTCN PAM
ccccuuauuuguggaagaaa

SEQ ID NO: 23913 - RNA, 20 nt, Artificial Sequence
  targeting sequence with TTCN PAM
acaaauaaggggggaaagaa

SEQ ID NO: 23914 - RNA, 20 nt, Artificial Sequence
  targeting sequence with TTCN PAM
uccacaaauaaggggggaaa

SEQ ID NO: 23915 - RNA, 20 nt, Artificial Sequence
  targeting sequence with TTCN PAM
cagaggcacccagacugaga

SEQ ID NO: 23916 - RNA, 20 nt, Artificial Sequence
  targeting sequence with TTCN PAM
uaacuguggguuuacaggac

SEQ ID NO: 23917 - RNA, 20 nt, Artificial Sequence
  targeting sequence with TTCN PAM
cccaauuuagauuguuuuuc

SEQ ID NO: 23918 - RNA, 20 nt, Artificial Sequence
  targeting sequence with TTCN PAM
aaaggaauacuccauucuuu

SEQ ID NO: 23919 - RNA, 20 nt, Artificial Sequence
  targeting sequence with TTCN PAM
uuuagaaaaacaaucuaaau

SEQ ID NO: 23920 - RNA, 20 nt, Artificial Sequence
  targeting sequence with TTCN PAM
uuaaaaagagagauuuggcu

SEQ ID NO: 23921 - RNA, 20 nt, Artificial Sequence
  targeting sequence with TTCN PAM
agaccagccuggccaacaug

SEQ ID NO: 23922 - RNA, 20 nt, Artificial Sequence
  targeting sequence with TTCN PAM
ccauguuggccaggcugguc

SEQ ID NO: 23923 - RNA, 20 nt, Artificial Sequence
  targeting sequence with TTCN PAM
ccugccucagccucccaagu

SEQ ID NO: 23924 - RNA, 20 nt, Artificial Sequence
  targeting sequence with TTCN PAM
agcaguucuccugccucagc

SEQ ID NO: 23925 - RNA, 20 nt, Artificial Sequence
  targeting sequence with TTCN PAM
uugagacacugucucucuau

SEQ ID NO: 23926 - RNA, 20 nt, Artificial Sequence
  targeting sequence with TTCN PAM
aguaccugcugaagcaggcg

SEQ ID NO: 23927 - RNA, 20 nt, Artificial Sequence
  targeting sequence with TTCN PAM
gcagguacuugaagcggagg

SEQ ID NO: 23928 - RNA, 20 nt, Artificial Sequence
  targeting sequence with TTCN PAM
aaguaagcgccccugaggga

SEQ ID NO: 23929 - RNA, 20 nt, Artificial Sequence
  targeting sequence with TTCN PAM
aguagaggccgcagcacuca

SEQ ID NO: 23930 - RNA, 20 nt, Artificial Sequence
  targeting sequence with TTCN PAM
ccuccgguccccuguccuug

SEQ ID NO: 23931 - RNA, 20 nt, Artificial Sequence
  targeting sequence with TTCN PAM
uccuguggucucagccgaga

SEQ ID NO: 23932 - RNA, 20 nt, Artificial Sequence
  targeting sequence with TTCN PAM
uagaggagagggcaucucgg

SEQ ID NO: 23933 - RNA, 20 nt, Artificial Sequence
  targeting sequence with TTCN PAM
ccuguccuggacaccaacag

SEQ ID NO: 23934 - RNA, 20 nt, Artificial Sequence
  targeting sequence with TTCN PAM
ggguccugggcacguagccc

SEQ ID NO: 23935 - RNA, 20 nt, Artificial Sequence
  targeting sequence with TTCN PAM
uggaauuccucaccacagca

SEQ ID NO: 23936 - RNA, 20 nt, Artificial Sequence
  targeting sequence with TTCN PAM
aggaaggggcuacgugccca

SEQ ID NO: 23937 - RNA, 20 nt, Artificial Sequence
  targeting sequence with TTCN PAM
ucaccacagcaaaggguuuu

SEQ ID NO: 23938 - RNA, 20 nt, Artificial Sequence
  targeting sequence with TTCN PAM
cucugcuggcaccucccuga

SEQ ID NO: 23939 - RNA, 20 nt, Artificial Sequence
  targeting sequence with TTCN PAM
aaggggagaguuucaucuuu

SEQ ID NO: 23940 - RNA, 20 nt, Artificial Sequence
  targeting sequence with TTCN PAM
ucuuuauaaggaggcuccaa

SEQ ID NO: 23941 - RNA, 20 nt, Artificial Sequence
  targeting sequence with TTCN PAM
ugguggcugaugacaguccu

SEQ ID NO: 23942 - RNA, 20 nt, Artificial Sequence
  targeting sequence with TTCN PAM
ugcauguagcagcugccaug

SEQ ID NO: 23943 - RNA, 20 nt, Artificial Sequence
  targeting sequence with TTCN PAM
auggcaacugucauggcagc

SEQ ID NO: 23944 - RNA, 20 nt, Artificial Sequence
  targeting sequence with TTCN PAM
ccagcauuccauggcaacug

SEQ ID NO: 23945 - RNA, 20 nt, Artificial Sequence
  targeting sequence with TTCN PAM
cagccuaccccaagccgguc

SEQ ID NO: 23946 - RNA, 20 nt, Artificial Sequence
  targeting sequence with TTCN PAM
gugaucugucaccagguaac

SEQ ID NO: 23947 - RNA, 20 nt, Artificial Sequence
  targeting sequence with TTCN PAM
accagggugggacuuucugu

SEQ ID NO: 23948 - RNA, 20 nt, Artificial Sequence
  targeting sequence with TTCN PAM
cccugcuuagccgccugguc

SEQ ID NO: 23949 - RNA, 20 nt, Artificial Sequence
  targeting sequence with TTCN PAM
ccccucaacugccagcacac

SEQ ID NO: 23950 - RNA, 20 nt, Artificial Sequence
  targeting sequence with TTCN PAM
agucuuggugauggggagcc

SEQ ID NO: 23951 - RNA, 20 nt, Artificial Sequence
  targeting sequence with TTCN PAM
ugucccccaacccucagggc

SEQ ID NO: 23952 - RNA, 20 nt, Artificial Sequence
  targeting sequence with TTCN PAM
uuccugucccccaacccuca

SEQ ID NO: 23953 - RNA, 20 nt, Artificial Sequence
  targeting sequence with TTCN PAM
cugccgcucacagccuuggu

SEQ ID NO: 23954 - RNA, 20 nt, Artificial Sequence
  targeting sequence with TTCN PAM
caucuuuacagcaggacaau

SEQ ID NO: 23955 - RNA, 20 nt, Artificial Sequence
  targeting sequence with TTCN PAM
uccgcccuccuccagccgug

SEQ ID NO: 23956 - RNA, 20 nt, Artificial Sequence
  targeting sequence with TTCN PAM
gcugagcgucaaggggcgag

SEQ ID NO: 23957 - RNA, 20 nt, Artificial Sequence
  targeting sequence with TTCN PAM
ggguagugggggaggaggag

SEQ ID NO: 23958 - RNA, 20 nt, Artificial Sequence
  targeting sequence with TTCN PAM
cacagauugugccucuggac

SEQ ID NO: 23959 - RNA, 20 nt, Artificial Sequence
  targeting sequence with TTCN PAM
aggaucucaggaucucucaa

SEQ ID NO: 23960 - RNA, 20 nt, Artificial Sequence
  targeting sequence with TTCN PAM
ugccuucucccugccucuca

SEQ ID NO: 23961 - RNA, 20 nt, Artificial Sequence
  targeting sequence with TTCN PAM
cccugccucucacugccugu

SEQ ID NO: 23962 - RNA, 20 nt, Artificial Sequence
  targeting sequence with TTCN PAM
aaacaggggggcuccacagg

SEQ ID NO: 23963 - RNA, 20 nt, Artificial Sequence
  targeting sequence with TTCN PAM
gagucuuacggggggugggg

SEQ ID NO: 23964 - RNA, 20 nt, Artificial Sequence
  targeting sequence with TTCN PAM
gccccaccccguguccuucu

SEQ ID NO: 23965 - RNA, 20 nt, Artificial Sequence
  targeting sequence with TTCN PAM
ccaguuaguucccaagcaca

SEQ ID NO: 23966 - RNA, 20 nt, Artificial Sequence
  targeting sequence with TTCN PAM
caagcacaagaagaaaaucc

SEQ ID NO: 23967 - RNA, 20 nt, Artificial Sequence
  targeting sequence with TTCN PAM
ugugcuugggaacuaacugg

SEQ ID NO: 23968 - RNA, 20 nt, Artificial Sequence
  targeting sequence with TTCN PAM
ucuugugcuugggaacuaac

SEQ ID NO: 23969 - RNA, 20 nt, Artificial Sequence
  targeting sequence with TTCN PAM
ugggcuggauuuucuucuug

SEQ ID NO: 23970 - RNA, 20 nt, Artificial Sequence
  targeting sequence with TTCN PAM
ccuuggccucacccgcucuc

SEQ ID NO: 23971 - RNA, 20 nt, Artificial Sequence
  targeting sequence with TTCN PAM
uggggcccuuccccuuggcc

SEQ ID NO: 23972 - RNA, 20 nt, Artificial Sequence
  targeting sequence with TTCN PAM
ccuugcccacguugggaggg

SEQ ID NO: 23973 - RNA, 20 nt, Artificial Sequence
  targeting sequence with TTCN PAM
gcaccuuugcuggccucuug

SEQ ID NO: 23974 - RNA, 20 nt, Artificial Sequence
  targeting sequence with TTCN PAM
cuguggcugcgccuggcuug

SEQ ID NO: 23975 - RNA, 20 nt, Artificial Sequence
  targeting sequence with TTCN PAM
uagccucucccgacugugcc

SEQ ID NO: 23976 - RNA, 20 nt, Artificial Sequence
  targeting sequence with TTCN PAM
agugcuggugggcucagcag

SEQ ID NO: 23977 - RNA, 20 nt, Artificial Sequence
  targeting sequence with TTCN PAM
ugcugagcccaccagcacug

SEQ ID NO: 23978 - RNA, 20 nt, Artificial Sequence
  targeting sequence with TTCN PAM
uuaucuagugcauguguccu

SEQ ID NO: 23979 - RNA, 20 nt, Artificial Sequence
  targeting sequence with TTCN PAM
cucucuccaggucaagccca

SEQ ID NO: 23980 - RNA, 20 nt, Artificial Sequence
  targeting sequence with TTCN PAM
cccaaccagcuaccaugagu

SEQ ID NO: 23981 - RNA, 20 nt, Artificial Sequence
  targeting sequence with TTCN PAM
aggguuaugaagggggaagc

SEQ ID NO: 23982 - RNA, 20 nt, Artificial Sequence
  targeting sequence with TTCN PAM
uaacccuugaaaugucugcc

SEQ ID NO: 23983 - RNA, 20 nt, Artificial Sequence
  targeting sequence with TTCN PAM
cccuucauaacccuugaaau

SEQ ID NO: 23984 - RNA, 20 nt, Artificial Sequence
  targeting sequence with TTCN PAM
ugaggcaguggaggaaggug

SEQ ID NO: 23985 - RNA, 20 nt, Artificial Sequence
  targeting sequence with TTCN PAM
uccacugccucaagaaugag

SEQ ID NO: 23986 - RNA, 20 nt, Artificial Sequence
  targeting sequence with TTCN PAM
ccugcuugagacaccuuccu

SEQ ID NO: 23987 - RNA, 20 nt, Artificial Sequence
  targeting sequence with TTCN PAM
uuaugccuccaggccuuuac

SEQ ID NO: 23988 - RNA, 20 nt, Artificial Sequence
  targeting sequence with TTCN PAM
ccauguugaccagguugguc

SEQ ID NO: 23989 - RNA, 20 nt, Artificial Sequence
  targeting sequence with TTCN PAM
ugccucagccacccaaguac

SEQ ID NO: 23990 - RNA, 20 nt, Artificial Sequence
  targeting sequence with TTCN PAM
agugauuuuccugccucagc

SEQ ID NO: 23991 - RNA, 20 nt, Artificial Sequence
  targeting sequence with TTCN PAM
uuuuguguuuuguuuugaga

SEQ ID NO: 23992 - RNA, 20 nt, Artificial Sequence
  targeting sequence with TTCN PAM
ucaaauacuccaccuucuuu

SEQ ID NO: 23993 - RNA, 20 nt, Artificial Sequence
  targeting sequence with TTCN PAM
gucuaccuacaguuuuggca

SEQ ID NO: 23994 - RNA, 20 nt, Artificial Sequence
  targeting sequence with TTCN PAM
ccuugccaaaacuguaggua

SEQ ID NO: 23995 - RNA, 20 nt, Artificial Sequence
  targeting sequence with TTCN PAM
cagcuucuccuugccaaaac

SEQ ID NO: 23996 - RNA, 20 nt, Artificial Sequence
  targeting sequence with TTCN PAM
agcugcccuucacagcuucu

SEQ ID NO: 23997 - RNA, 20 nt, Artificial Sequence
  targeting sequence with TTCN PAM
acagcucugcauuguccucc

SEQ ID NO: 23998 - RNA, 20 nt, Artificial Sequence
  targeting sequence with TTCN PAM
gacaggaagcagcuagggcu

SEQ ID NO: 23999 - RNA, 20 nt, Artificial Sequence
  targeting sequence with TTCN PAM
ugucagaauccuuccacagc

SEQ ID NO: 24000 - RNA, 20 nt, Artificial Sequence
  targeting sequence with TTCN PAM
ucucucucuuuuagagacag

SEQ ID NO: 24001 - RNA, 20 nt, Artificial Sequence
  targeting sequence with TTCN PAM
ugggcucagcacucaccugu

SEQ ID NO: 24002 - RNA, 20 nt, Artificial Sequence
  targeting sequence with TTCN PAM
accuggcagccaggauacuu

SEQ ID NO: 24003 - RNA, 20 nt, Artificial Sequence
  targeting sequence with TTCN PAM
guuaacccuccagccacucu

SEQ ID NO: 24004 - RNA, 20 nt, Artificial Sequence
  targeting sequence with TTCN PAM
cagucuucaaacuaggucac

SEQ ID NO: 24005 - RNA, 20 nt, Artificial Sequence
  targeting sequence with TTCN PAM
aacuaggucacugaggcuca

SEQ ID NO: 24006 - RNA, 20 nt, Artificial Sequence
  targeting sequence with TTCN PAM
cucaguuaugugacaugggg

SEQ ID NO: 24007 - RNA, 20 nt, Artificial Sequence
  targeting sequence with TTCN PAM
uccuggguccuaggucuuca

SEQ ID NO: 24008 - RNA, 20 nt, Artificial Sequence
  targeting sequence with TTCN PAM
agagccccugaaacuuccug

SEQ ID NO: 24009 - RNA, 20 nt, Artificial Sequence
  targeting sequence with TTCN PAM
ggggcucuagaacccccauu

SEQ ID NO: 24010 - RNA, 20 nt, Artificial Sequence
  targeting sequence with TTCN PAM
ugccccaccagcaguuccuc

SEQ ID NO: 24011 - RNA, 20 nt, Artificial Sequence
  targeting sequence with TTCN PAM
uccuucuuccccuauaaaac

SEQ ID NO: 24012 - RNA, 20 nt, Artificial Sequence
  targeting sequence with TTCN PAM
uccccuauaaaaccuccucc

SEQ ID NO: 24013 - RNA, 20 nt, Artificial Sequence
  targeting sequence with TTCN PAM
ccuauaaaaccuccuccauc

SEQ ID NO: 24014 - RNA, 20 nt, Artificial Sequence
  targeting sequence with TTCN PAM
aggagaugcugaggccuaca

SEQ ID NO: 24015 - RNA, 20 nt, Artificial Sequence
  targeting sequence with TTCN PAM
uguaggccucagcaucuccu

SEQ ID NO: 24016 - RNA, 20 nt, Artificial Sequence
  targeting sequence with TTCN PAM
aaacccacggccagcaaggu

SEQ ID NO: 24017 - RNA, 20 nt, Artificial Sequence
  targeting sequence with TTCN PAM
ugcaggcaccuaccuugcug

SEQ ID NO: 24018 - RNA, 20 nt, Artificial Sequence
  targeting sequence with TTCN PAM
uggccuggcugccugcccug

SEQ ID NO: 24019 - RNA, 20 nt, Artificial Sequence
  targeting sequence with TTCN PAM
gggcaggcagccaggccagg

SEQ ID NO: 24020 - RNA, 20 nt, Artificial Sequence
  targeting sequence with TTCN PAM
gggggcugagugugggaugc

SEQ ID NO: 24021 - RNA, 20 nt, Artificial Sequence
  targeting sequence with TTCN PAM
uuuccuacaaagcacagucc

SEQ ID NO: 24022 - RNA, 20 nt, Artificial Sequence
  targeting sequence with TTCN PAM
uacaaagcacaguccaccac

SEQ ID NO: 24023 - RNA, 20 nt, Artificial Sequence
  targeting sequence with TTCN PAM
cucugguccccuggcacccu

SEQ ID NO: 24024 - RNA, 20 nt, Artificial Sequence
  targeting sequence with TTCN PAM
aagccuuagucucuuaucug

SEQ ID NO: 24025 - RNA, 20 nt, Artificial Sequence
  targeting sequence with TTCN PAM
gcccuucccagcugucucuu

SEQ ID NO: 24026 - RNA, 20 nt, Artificial Sequence
  targeting sequence with TTCN PAM
cagcugucucuuugcuccug

SEQ ID NO: 24027 - RNA, 20 nt, Artificial Sequence
  targeting sequence with TTCN PAM
uauaggucaagaauggugcu

SEQ ID NO: 24028 - RNA, 20 nt, Artificial Sequence
  targeting sequence with TTCN PAM
ugaccuauacgaaagcaaac

SEQ ID NO: 24029 - RNA, 20 nt, Artificial Sequence
  targeting sequence with TTCN PAM
ccgaccaaaaagaagguggu

SEQ ID NO: 24030 - RNA, 20 nt, Artificial Sequence
  targeting sequence with TTCN PAM
uuuuggucggggaagcagca

SEQ ID NO: 24031 - RNA, 20 nt, Artificial Sequence
  targeting sequence with TTCN PAM
uggacaaaugugcagguacc

SEQ ID NO: 24032 - RNA, 20 nt, Artificial Sequence
  targeting sequence with TTCN PAM
agggcccuugggggccucug

SEQ ID NO: 24033 - RNA, 20 nt, Artificial Sequence
  targeting sequence with TTCN PAM
gcccucuggcuggacacuuu

SEQ ID NO: 24034 - RNA, 20 nt, Artificial Sequence
  targeting sequence with TTCN PAM
ucaacuaaccacugcucuau

SEQ ID NO: 24035 - RNA, 20 nt, Artificial Sequence
  targeting sequence with TTCN PAM
acuaaccacugcucuauuua

SEQ ID NO: 24036 - RNA, 20 nt, Artificial Sequence
  targeting sequence with TTCN PAM
uuguaagcuauuuaucaaua

SEQ ID NO: 24037 - RNA, 20 nt, Artificial Sequence
  targeting sequence with TTCN PAM
uuuuccucacaauuggugug

SEQ ID NO: 24038 - RNA, 20 nt, Artificial Sequence
  targeting sequence with TTCN PAM
ucacaauugguguggguaga

SEQ ID NO: 24039 - RNA, 20 nt, Artificial Sequence
  targeting sequence with TTCN PAM
aggauuuggccauucggucc

SEQ ID NO: 24040 - RNA, 20 nt, Artificial Sequence
  targeting sequence with TTCN PAM
guccuucaugaacauccgcu

SEQ ID NO: 24041 - RNA, 20 nt, Artificial Sequence
  targeting sequence with TTCN PAM
ugaacauccgcugagcaccu

SEQ ID NO: 24042 - RNA, 20 nt, Artificial Sequence
  targeting sequence with TTCN PAM
ugaaggaccgaauggccaaa

SEQ ID NO: 24043 - RNA, 20 nt, Artificial Sequence
  targeting sequence with TTCN PAM
aggaugagauggcuuuugau

SEQ ID NO: 24044 - RNA, 20 nt, Artificial Sequence
  targeting sequence with TTCN PAM
ucccaccccucagauggcau

SEQ ID NO: 24045 - RNA, 20 nt, Artificial Sequence
  targeting sequence with TTCN PAM
aaacagauccccuccuuuca

SEQ ID NO: 24046 - RNA, 20 nt, Artificial Sequence
  targeting sequence with TTCN PAM
uucuaaacagauccccuccu

SEQ ID NO: 24047 - RNA, 20 nt, Artificial Sequence
  targeting sequence with TTCN PAM
acugccagaggguucuuucu

SEQ ID NO: 24048 - RNA, 20 nt, Artificial Sequence
  targeting sequence with TTCN PAM
uuuccacugccagaggguuc

SEQ ID NO: 24049 - RNA, 20 nt, Artificial Sequence
  targeting sequence with TTCN PAM
cagcuacucuaauccuuccu

SEQ ID NO: 24050 - RNA, 20 nt, Artificial Sequence
  targeting sequence with TTCN PAM
gccacugguucccgagugcu

SEQ ID NO: 24051 - RNA, 20 nt, Artificial Sequence
  targeting sequence with TTCN PAM
cgagugcuccugggccaggc

SEQ ID NO: 24052 - RNA, 20 nt, Artificial Sequence
  targeting sequence with TTCN PAM
gagcacaggcgcuggcugca

SEQ ID NO: 24053 - RNA, 20 nt, Artificial Sequence
  targeting sequence with TTCN PAM
ucagagcacaggcgcuggcu

SEQ ID NO: 24054 - RNA, 20 nt, Artificial Sequence
  targeting sequence with TTCN PAM
gcagaaggaagagugaaugc

SEQ ID NO: 24055 - RNA, 20 nt, Artificial Sequence
  targeting sequence with TTCN PAM
gcugaaaugguacccccucc

SEQ ID NO: 24056 - RNA, 20 nt, Artificial Sequence
  targeting sequence with TTCN PAM
uucugcugaaaugguacccc

SEQ ID NO: 24057 - RNA, 20 nt, Artificial Sequence
  targeting sequence with TTCN PAM
cucuuccuucugcugaaaug

SEQ ID NO: 24058 - RNA, 20 nt, Artificial Sequence
  targeting sequence with TTCN PAM
caccccagggccuuugcauu

SEQ ID NO: 24059 - RNA, 20 nt, Artificial Sequence
  targeting sequence with TTCN PAM
ugcagcucccagcgugagga

SEQ ID NO: 24060 - RNA, 20 nt, Artificial Sequence
  targeting sequence with TTCN PAM
acuggucaaguaaucaugga

SEQ ID NO: 24061 - RNA, 20 nt, Artificial Sequence
  targeting sequence with TTCN PAM
gggccccaccuuaaggcagc

SEQ ID NO: 24062 - RNA, 20 nt, Artificial Sequence
  targeting sequence with TTCN PAM
acuucuuguguuugaggaca

SEQ ID NO: 24063 - RNA, 20 nt, Artificial Sequence
  targeting sequence with TTCN PAM
uguguuugaggacacuuuuu

SEQ ID NO: 24064 - RNA, 20 nt, Artificial Sequence
  targeting sequence with TTCN PAM
aacuuggccaccacucuaug

SEQ ID NO: 24065 - RNA, 20 nt, Artificial Sequence
  targeting sequence with TTCN PAM
cauagagugguggccaaguu

SEQ ID NO: 24066 - RNA, 20 nt, Artificial Sequence
  targeting sequence with TTCN PAM
ucuccacaagcugcaugggc

SEQ ID NO: 24067 - RNA, 20 nt, Artificial Sequence
  targeting sequence with TTCN PAM
gcuccugcugaacucucuga

SEQ ID NO: 24068 - RNA, 20 nt, Artificial Sequence
  targeting sequence with TTCN PAM
gcaggagcugaaaaauggag

SEQ ID NO: 24069 - RNA, 20 nt, Artificial Sequence
  targeting sequence with TTCN PAM
gaugguggcacgugguacca

SEQ ID NO: 24070 - RNA, 20 nt, Artificial Sequence
  targeting sequence with TTCN PAM
aacacgcauucagauggugg

SEQ ID NO: 24071 - RNA, 20 nt, Artificial Sequence
  targeting sequence with TTCN PAM
agcccuaauugagcuggccc

SEQ ID NO: 24072 - RNA, 20 nt, Artificial Sequence
  targeting sequence with TTCN PAM
gcugggccagcucaauuagg

SEQ ID NO: 24073 - RNA, 20 nt, Artificial Sequence
  targeting sequence with TTCN PAM
accagguuucugcugggcca

SEQ ID NO: 24074 - RNA, 20 nt, Artificial Sequence
  targeting sequence with TTCN PAM
ugccaagcccugcccugauu

SEQ ID NO: 24075 - RNA, 20 nt, Artificial Sequence
  targeting sequence with TTCN PAM
ugggcaaaauaagugacugc

SEQ ID NO: 24076 - RNA, 20 nt, Artificial Sequence
  targeting sequence with TTCN PAM
aaacagauccccuuccuuuc

SEQ ID NO: 24077 - RNA, 20 nt, Artificial Sequence
  targeting sequence with TTCN PAM
uuucacuggaacaagggcug

SEQ ID NO: 24078 - RNA, 20 nt, Artificial Sequence
  targeting sequence with TTCN PAM
cuggaacaagggcugcaggg

SEQ ID NO: 24079 - RNA, 20 nt, Artificial Sequence
  targeting sequence with TTCN PAM
agugaaaggaaggggaucug

SEQ ID NO: 24080 - RNA, 20 nt, Artificial Sequence
  targeting sequence with TTCN PAM
uuaugacaaagcccaccgug

SEQ ID NO: 24081 - RNA, 20 nt, Artificial Sequence
  targeting sequence with TTCN PAM
ucuggguuguggcaggagcc

SEQ ID NO: 24082 - RNA, 20 nt, Artificial Sequence
  targeting sequence with TTCN PAM
aacccucccucugugagcau

SEQ ID NO: 24083 - RNA, 20 nt, Artificial Sequence
  targeting sequence with TTCN PAM
ggaucgcuguugaagauggu

SEQ ID NO: 24084 - RNA, 20 nt, Artificial Sequence
  targeting sequence with TTCN PAM
acagcgauccagaagcuacc

SEQ ID NO: 24085 - RNA, 20 nt, Artificial Sequence
  targeting sequence with TTCN PAM
caccaucuucaacagcgauc

SEQ ID NO: 24086 - RNA, 20 nt, Artificial Sequence
  targeting sequence with TTCN PAM
uacauccaauccaucagcag

SEQ ID NO: 24087 - RNA, 20 nt, Artificial Sequence
  targeting sequence with TTCN PAM
ugaggugaggacuuggcacg

SEQ ID NO: 24088 - RNA, 20 nt, Artificial Sequence
  targeting sequence with TTCN PAM
cucuguccuccguggcuagg

SEQ ID NO: 24089 - RNA, 20 nt, Artificial Sequence
  targeting sequence with TTCN PAM
uucucucuguccuccguggc

SEQ ID NO: 24090 - RNA, 20 nt, Artificial Sequence
  targeting sequence with TTCN PAM
caaguccugugcaguuugcc

SEQ ID NO: 24091 - RNA, 20 nt, Artificial Sequence
  targeting sequence with TTCN PAM
cuuugugccccgucugcccc

SEQ ID NO: 24092 - RNA, 20 nt, Artificial Sequence
  targeting sequence with TTCN PAM
ugccccugcuccaccacccc

SEQ ID NO: 24093 - RNA, 20 nt, Artificial Sequence
  targeting sequence with TTCN PAM
aggaggagaggguggggugg

SEQ ID NO: 24094 - RNA, 20 nt, Artificial Sequence
  targeting sequence with TTCN PAM
ggguccugcuggcagccaca

SEQ ID NO: 24095 - RNA, 20 nt, Artificial Sequence
  targeting sequence with TTCN PAM
ugaggaggggucugcuccug

SEQ ID NO: 24096 - RNA, 20 nt, Artificial Sequence
  targeting sequence with TTCN PAM
cggcuuggcccagugcugug

SEQ ID NO: 24097 - RNA, 20 nt, Artificial Sequence
  targeting sequence with TTCN PAM
uggaugcuagacacccccca

SEQ ID NO: 24098 - RNA, 20 nt, Artificial Sequence
  targeting sequence with TTCN PAM
uuccuuuucaaaggaguuua

SEQ ID NO: 24099 - RNA, 20 nt, Artificial Sequence
  targeting sequence with TTCN PAM
uuuucaaaggaguuuaguuu

SEQ ID NO: 24100 - RNA, 20 nt, Artificial Sequence
  targeting sequence with TTCN PAM
aaggaguuuaguuuaaggau

SEQ ID NO: 24101 - RNA, 20 nt, Artificial Sequence
  targeting sequence with TTCN PAM
uacccuuugagggucauagg

SEQ ID NO: 24102 - RNA, 20 nt, Artificial Sequence
  targeting sequence with TTCN PAM
uggaagguggccaccuucug

SEQ ID NO: 24103 - RNA, 20 nt, Artificial Sequence
  targeting sequence with TTCN PAM
augaaccaauuauaauccuu

SEQ ID NO: 24104 - RNA, 20 nt, Artificial Sequence
  targeting sequence with TTCN PAM
gcgcugagaaacgacucugg

SEQ ID NO: 24105 - RNA, 20 nt, Artificial Sequence
  targeting sequence with TTCN PAM
cagcgcagaagguggccacc

SEQ ID NO: 24106 - RNA, 20 nt, Artificial Sequence
  targeting sequence with TTCN PAM
agagucguuucucagcgcag

SEQ ID NO: 24107 - RNA, 20 nt, Artificial Sequence
  targeting sequence with TTCN PAM
uccauuugcaaauacauuuc

SEQ ID NO: 24108 - RNA, 20 nt, Artificial Sequence
  targeting sequence with TTCN PAM
aaacgucaaggaggaacuga

SEQ ID NO: 24109 - RNA, 20 nt, Artificial Sequence
  targeting sequence with TTCN PAM
uccuugacguuuagaaaugu

SEQ ID NO: 24110 - RNA, 20 nt, Artificial Sequence
  targeting sequence with TTCN PAM
guuccuccuugacguuuaga

SEQ ID NO: 24111 - RNA, 20 nt, Artificial Sequence
  targeting sequence with TTCN PAM
acagccugucuuaaugucug

SEQ ID NO: 24112 - RNA, 20 nt, Artificial Sequence
  targeting sequence with TTCN PAM
augucauuaaauauuccaca

SEQ ID NO: 24113 - RNA, 20 nt, Artificial Sequence
  targeting sequence with TTCN PAM
cccaugcgacaauaugucag

SEQ ID NO: 24114 - RNA, 20 nt, Artificial Sequence
  targeting sequence with TTCN PAM
cuccucggccccgccccauc

SEQ ID NO: 24115 - RNA, 20 nt, Artificial Sequence
  targeting sequence with TTCN PAM
cagagacgcucgccacaaac

SEQ ID NO: 24116 - RNA, 20 nt, Artificial Sequence
  targeting sequence with TTCN PAM
ucacgcuuuuugugcuuccu

SEQ ID NO: 24117 - RNA, 20 nt, Artificial Sequence
  targeting sequence with TTCN PAM
cgcuuuuugugcuuccuaca

SEQ ID NO: 24118 - RNA, 20 nt, Artificial Sequence
  targeting sequence with TTCN PAM
uacauuucucugggaaccgu

SEQ ID NO: 24119 - RNA, 20 nt, Artificial Sequence
  targeting sequence with TTCN PAM
cugggaaccguguauucauu

SEQ ID NO: 24120 - RNA, 20 nt, Artificial Sequence
  targeting sequence with TTCN PAM
cagagaaauguaggaagcac

SEQ ID NO: 24121 - RNA, 20 nt, Artificial Sequence
  targeting sequence with TTCN PAM
uuccagaaucacacccaccc

SEQ ID NO: 24122 - RNA, 20 nt, Artificial Sequence
  targeting sequence with TTCN PAM
agaaucacacccaccccccu

SEQ ID NO: 24123 - RNA, 20 nt, Artificial Sequence
  targeting sequence with TTCN PAM
ggaaugaauacacgguuccc

SEQ ID NO: 24124 - RNA, 20 nt, Artificial Sequence
  targeting sequence with TTCN PAM
aauuuaaguuaucagcacau

SEQ ID NO: 24125 - RNA, 20 nt, Artificial Sequence
  targeting sequence with TTCN PAM
uauuaagcagcagauuuucu

SEQ ID NO: 24126 - RNA, 20 nt, Artificial Sequence
  targeting sequence with TTCN PAM
uucuuauuaagcagcagauu

SEQ ID NO: 24127 - RNA, 20 nt, Artificial Sequence
  targeting sequence with TTCN PAM
gagcauugauuccuucuuau

SEQ ID NO: 24128 - RNA, 20 nt, Artificial Sequence
  targeting sequence with TTCN PAM
auucugagcauugauuccuu

SEQ ID NO: 24129 - RNA, 20 nt, Artificial Sequence
  targeting sequence with TTCN PAM
cauuuucuauucugagcauu

SEQ ID NO: 24130 - RNA, 20 nt, Artificial Sequence
  targeting sequence with TTCN PAM
guguggagagauagucuuua

SEQ ID NO: 24131 - RNA, 20 nt, Artificial Sequence
  targeting sequence with TTCN PAM
uacaguggcuucugugugga

SEQ ID NO: 24132 - RNA, 20 nt, Artificial Sequence
  targeting sequence with TTCN PAM
cacuuuucuguucucauuaa

SEQ ID NO: 24133 - RNA, 20 nt, Artificial Sequence
  targeting sequence with TTCN PAM
guucucauuaauuuuagaac

SEQ ID NO: 24134 - RNA, 20 nt, Artificial Sequence
  targeting sequence with TTCN PAM
cauuaauuuuagaacuggua

SEQ ID NO: 24135 - RNA, 20 nt, Artificial Sequence
  targeting sequence with TTCN PAM
aaaauuaaugagaacagaaa

SEQ ID NO: 24136 - RNA, 20 nt, Artificial Sequence
  targeting sequence with TTCN PAM
uaaaauuuaaacaaaauccc

SEQ ID NO: 24137 - RNA, 20 nt, Artificial Sequence
  targeting sequence with TTCN PAM
uacucuugauaaauacaugu

SEQ ID NO: 24138 - RNA, 20 nt, Artificial Sequence
  targeting sequence with TTCN PAM
uucaaaaaagcaagaaauua

SEQ ID NO: 24139 - RNA, 20 nt, Artificial Sequence
  targeting sequence with TTCN PAM
aaaaagcaagaaauuaagug

SEQ ID NO: 24140 - RNA, 20 nt, Artificial Sequence
  targeting sequence with TTCN PAM
ugcuuuuuugaaggaaaaau

SEQ ID NO: 24141 - RNA, 20 nt, Artificial Sequence
  targeting sequence with TTCN PAM
cugggguuggagaggagcca

SEQ ID NO: 24142 - RNA, 20 nt, Artificial Sequence
  targeting sequence with TTCN PAM
agcccugcuggcuccucucc

SEQ ID NO: 24143 - RNA, 20 nt, Artificial Sequence
  targeting sequence with TTCN PAM
uuguucuugugggcaggggu

SEQ ID NO: 24144 - RNA, 20 nt, Artificial Sequence
  targeting sequence with TTCN PAM
ugugggcaggggugaggaac

SEQ ID NO: 24145 - RNA, 20 nt, Artificial Sequence
  targeting sequence with TTCN PAM
ucaccccugcccacaagaac

SEQ ID NO: 24146 - RNA, 20 nt, Artificial Sequence
  targeting sequence with TTCN PAM
ccacaaguacaggcuguucc

SEQ ID NO: 24147 - RNA, 20 nt, Artificial Sequence
  targeting sequence with TTCN PAM
uugucugagaaaugagcuua

SEQ ID NO: 24148 - RNA, 20 nt, Artificial Sequence
  targeting sequence with TTCN PAM
cagacaaggaagcaggcagu

SEQ ID NO: 24149 - RNA, 20 nt, Artificial Sequence
  targeting sequence with TTCN PAM
caucaagcuuaaaaaauacg

SEQ ID NO: 24150 - RNA, 20 nt, Artificial Sequence
  targeting sequence with TTCN PAM
ggguaaguuaagugucaguu

SEQ ID NO: 24151 - RNA, 20 nt, Artificial Sequence
  targeting sequence with TTCN PAM
cuuuccaggguggucaccuu

SEQ ID NO: 24152 - RNA, 20 nt, Artificial Sequence
  targeting sequence with TTCN PAM
aggguggucaccuuuggccu

SEQ ID NO: 24153 - RNA, 20 nt, Artificial Sequence
  targeting sequence with TTCN PAM
gggccagagucuccacagug

SEQ ID NO: 24154 - RNA, 20 nt, Artificial Sequence
  targeting sequence with TTCN PAM
gucccuuccugguuguguga

SEQ ID NO: 24155 - RNA, 20 nt, Artificial Sequence
  targeting sequence with TTCN PAM
ugguugugugaccuugagaa

SEQ ID NO: 24156 - RNA, 20 nt, Artificial Sequence
  targeting sequence with TTCN PAM
caaggucacacaaccaggaa

SEQ ID NO: 24157 - RNA, 20 nt, Artificial Sequence
  targeting sequence with TTCN PAM
gcugugcugagccucaaguu

SEQ ID NO: 24158 - RNA, 20 nt, Artificial Sequence
  targeting sequence with TTCN PAM
ugacgggcuuguuagagaug

SEQ ID NO: 24159 - RNA, 20 nt, Artificial Sequence
  targeting sequence with TTCN PAM
cagcugcugugugcugccug

SEQ ID NO: 24160 - RNA, 20 nt, Artificial Sequence
  targeting sequence with TTCN PAM
uggaggucccgggguguccu

SEQ ID NO: 24161 - RNA, 20 nt, Artificial Sequence
  targeting sequence with TTCN PAM
uuaagcucugaggacacccc

SEQ ID NO: 24162 - RNA, 20 nt, Artificial Sequence
  targeting sequence with TTCN PAM
ucuccuggccucugacugcc

SEQ ID NO: 24163 - RNA, 20 nt, Artificial Sequence
  targeting sequence with TTCN PAM
cagaagcuagucaggugucu

SEQ ID NO: 24164 - RNA, 20 nt, Artificial Sequence
  targeting sequence with TTCN PAM
gagaaggcagucagaggcca

SEQ ID NO: 24165 - RNA, 20 nt, Artificial Sequence
  targeting sequence with TTCN PAM
uuaccaguuugugagagaga

SEQ ID NO: 24166 - RNA, 20 nt, Artificial Sequence
  targeting sequence with TTCN PAM
cccgcuuggcuaucucagga

SEQ ID NO: 24167 - RNA, 20 nt, Artificial Sequence
  targeting sequence with TTCN PAM
uuauaauaaaagccuuacgg

SEQ ID NO: 24168 - RNA, 20 nt, Artificial Sequence
  targeting sequence with TTCN PAM
agagucccagcugccccccu

SEQ ID NO: 24169 - RNA, 20 nt, Artificial Sequence
  targeting sequence with TTCN PAM
ggcaggaacggagugggugg

SEQ ID NO: 24170 - RNA, 20 nt, Artificial Sequence
  targeting sequence with TTCN PAM
ugccagaaacgacccucugu

SEQ ID NO: 24171 - RNA, 20 nt, Artificial Sequence
  targeting sequence with TTCN PAM
agagagcgggcagaccuggc

SEQ ID NO: 24172 - RNA, 20 nt, Artificial Sequence
  targeting sequence with TTCN PAM
aguguugcauggggagccuc

SEQ ID NO: 24173 - RNA, 20 nt, Artificial Sequence
  targeting sequence with TTCN PAM
caguuggugcaugauacguu

SEQ ID NO: 24174 - RNA, 20 nt, Artificial Sequence
  targeting sequence with TTCN PAM
aaagauagcaccacuuuuuu

SEQ ID NO: 24175 - RNA, 20 nt, Artificial Sequence
  targeting sequence with TTCN PAM
gcaagaucaaguagcccagc

SEQ ID NO: 24176 - RNA, 20 nt, Artificial Sequence
  targeting sequence with TTCN PAM
uggagacggggcucccagcu

SEQ ID NO: 24177 - RNA, 20 nt, Artificial Sequence
  targeting sequence with TTCN PAM
aggagggcucccugcaccag

SEQ ID NO: 24178 - RNA, 20 nt, Artificial Sequence
  targeting sequence with TTCN PAM
gggcugcagccuccgggcug

SEQ ID NO: 24179 - RNA, 20 nt, Artificial Sequence
  targeting sequence with TTCN PAM
ugggagagaacacaccccug

SEQ ID NO: 24180 - RNA, 20 nt, Artificial Sequence
  targeting sequence with TTCN PAM
cucccacgaacugaggcagg

SEQ ID NO: 24181 - RNA, 20 nt, Artificial Sequence
  targeting sequence with TTCN PAM
gggguguguucucucccacg

SEQ ID NO: 24182 - RNA, 20 nt, Artificial Sequence
  targeting sequence with TTCN PAM
uacucaaggacacacaucuc

SEQ ID NO: 24183 - RNA, 20 nt, Artificial Sequence
  targeting sequence with TTCN PAM
acaccaauguggccauggca

SEQ ID NO: 24184 - RNA, 20 nt, Artificial Sequence
  targeting sequence with TTCN PAM
gguauuucuauaaggaggca

SEQ ID NO: 24185 - RNA, 20 nt, Artificial Sequence
  targeting sequence with TTCN PAM
auaaggaggcaggaugggga

SEQ ID NO: 24186 - RNA, 20 nt, Artificial Sequence
  targeting sequence with TTCN PAM
gugggggccguggggaguug

SEQ ID NO: 24187 - RNA, 20 nt, Artificial Sequence
  targeting sequence with TTCN PAM
gcgaugaggccccucaaguc

SEQ ID NO: 24188 - RNA, 20 nt, Artificial Sequence
  targeting sequence with TTCN PAM
uccaugggacuugaggggcc

SEQ ID NO: 24189 - RNA, 20 nt, Artificial Sequence
  targeting sequence with TTCN PAM
cggacccugaaguccaaucu

SEQ ID NO: 24190 - RNA, 20 nt, Artificial Sequence
  targeting sequence with TTCN PAM
ggguccgggaagccgucuuc

SEQ ID NO: 24191 - RNA, 20 nt, Artificial Sequence
  targeting sequence with TTCN PAM
cagaguuugaggagcggggg

SEQ ID NO: 24192 - RNA, 20 nt, Artificial Sequence
  targeting sequence with TTCN PAM
ucaugcauuuucccagaguu

SEQ ID NO: 24193 - RNA, 20 nt, Artificial Sequence
  targeting sequence with TTCN PAM
gaaaugcccucugcgcuccc

SEQ ID NO: 24194 - RNA, 20 nt, Artificial Sequence
  targeting sequence with TTCN PAM
gaaguggcuguggccucuug

SEQ ID NO: 24195 - RNA, 20 nt, Artificial Sequence
  targeting sequence with TTCN PAM
ggcccccaucccccgccgcc

SEQ ID NO: 24196 - RNA, 20 nt, Artificial Sequence
  targeting sequence with TTCN PAM
ucucuugcucgcugagcggc

SEQ ID NO: 24197 - RNA, 20 nt, Artificial Sequence
  targeting sequence with TTCN PAM
gguacucaggaaucuccuug

SEQ ID NO: 24198 - RNA, 20 nt, Artificial Sequence
  targeting sequence with TTCN PAM
ugaguaccggaagaucgugc

SEQ ID NO: 24199 - RNA, 20 nt, Artificial Sequence
  targeting sequence with TTCN PAM
ccaaccaacaagcuccucua

SEQ ID NO: 24200 - RNA, 20 nt, Artificial Sequence
  targeting sequence with TTCN PAM
cugcccaggauucgccaacc

SEQ ID NO: 24201 - RNA, 20 nt, Artificial Sequence
  targeting sequence with TTCN PAM
ccagcagccaucuaacaccc

SEQ ID NO: 24202 - RNA, 20 nt, Artificial Sequence
  targeting sequence with TTCN PAM
ggaugagcccucaucccucc

SEQ ID NO: 24203 - RNA, 20 nt, Artificial Sequence
  targeting sequence with TTCN PAM
gugaccgggugagacucuuu

SEQ ID NO: 24204 - RNA, 20 nt, Artificial Sequence
  targeting sequence with TTCN PAM
ccaggacuguuaggacaaug

SEQ ID NO: 24205 - RNA, 20 nt, Artificial Sequence
  targeting sequence with TTCN PAM
uucaggggaaaagugcacgg

SEQ ID NO: 24206 - RNA, 20 nt, Artificial Sequence
  targeting sequence with TTCN PAM
ggggaaaagugcacgggcau

SEQ ID NO: 24207 - RNA, 20 nt, Artificial Sequence
  targeting sequence with TTCN PAM
ccugaaagaaguagggcccc

SEQ ID NO: 24208 - RNA, 20 nt, Artificial Sequence
  targeting sequence with TTCN PAM
cugcacgcagcccauuccac

SEQ ID NO: 24209 - RNA, 20 nt, Artificial Sequence
  targeting sequence with TTCN PAM
acguaacaaggauguguccu

SEQ ID NO: 24210 - RNA, 20 nt, Artificial Sequence
  targeting sequence with TTCN PAM
cagggugauaggucuuggug

SEQ ID NO: 24211 - RNA, 20 nt, Artificial Sequence
  targeting sequence with TTCN PAM
uggaagccugagugcuggcu

SEQ ID NO: 24212 - RNA, 20 nt, Artificial Sequence
  targeting sequence with TTCN PAM
aggaauccuagccaccaaga

SEQ ID NO: 24213 - RNA, 20 nt, Artificial Sequence
  targeting sequence with TTCN PAM
acugagccagcacucaggcu

SEQ ID NO: 24214 - RNA, 20 nt, Artificial Sequence
  targeting sequence with TTCN PAM
caccacaugcuccuaacgcc

SEQ ID NO: 24215 - RNA, 20 nt, Artificial Sequence
  targeting sequence with TTCN PAM
ggcguuaggagcauguggug

SEQ ID NO: 24216 - RNA, 20 nt, Artificial Sequence
  targeting sequence with TTCN PAM
uucaggcguuaggagcaugu

SEQ ID NO: 24217 - RNA, 20 nt, Artificial Sequence
  targeting sequence with TTCN PAM
uggcacuucuuucaggcguu

SEQ ID NO: 24218 - RNA, 20 nt, Artificial Sequence
  targeting sequence with TTCN PAM
uugucagucacgggcacccu

SEQ ID NO: 24219 - RNA, 20 nt, Artificial Sequence
  targeting sequence with TTCN PAM
gaggcaguacgugaguagua

SEQ ID NO: 24220 - RNA, 20 nt, Artificial Sequence
  targeting sequence with TTCN PAM
ccuucccgugguccgucucu

SEQ ID NO: 24221 - RNA, 20 nt, Artificial Sequence
  targeting sequence with TTCN PAM
cgugguccgucucugaaaug

SEQ ID NO: 24222 - RNA, 20 nt, Artificial Sequence
  targeting sequence with TTCN PAM
gagacggaccacgggaagga

SEQ ID NO: 24223 - RNA, 20 nt, Artificial Sequence
  targeting sequence with TTCN PAM
ugccucccugucuuugccug

SEQ ID NO: 24224 - RNA, 20 nt, Artificial Sequence
  targeting sequence with TTCN PAM
cucugccuggaaggccaucc

SEQ ID NO: 24225 - RNA, 20 nt, Artificial Sequence
  targeting sequence with TTCN PAM
aggcagagagaacggcgcag

SEQ ID NO: 24226 - RNA, 20 nt, Artificial Sequence
  targeting sequence with TTCN PAM
ucuucaaccucuaaagccag

SEQ ID NO: 24227 - RNA, 20 nt, Artificial Sequence
  targeting sequence with TTCN PAM
accucuaaagccagacacag

SEQ ID NO: 24228 - RNA, 20 nt, Artificial Sequence
  targeting sequence with TTCN PAM
ugcgguguguugggggcaca

SEQ ID NO: 24229 - RNA, 20 nt, Artificial Sequence
  targeting sequence with TTCN PAM
cugaaugcucgcuugaaugg

SEQ ID NO: 24230 - RNA, 20 nt, Artificial Sequence
  targeting sequence with TTCN PAM
gugaaggggugggcagaggg

SEQ ID NO: 24231 - RNA, 20 nt, Artificial Sequence
  targeting sequence with TTCN PAM
agcgagcauucagugaaggg

SEQ ID NO: 24232 - RNA, 20 nt, Artificial Sequence
  targeting sequence with TTCN PAM
ggggcuacugcccagagccu

SEQ ID NO: 24233 - RNA, 20 nt, Artificial Sequence
  targeting sequence with TTCN PAM
gaugauguugugccugacca

SEQ ID NO: 24234 - RNA, 20 nt, Artificial Sequence
  targeting sequence with TTCN PAM
cacaccggguucucaggccu

SEQ ID NO: 24235 - RNA, 20 nt, Artificial Sequence
  targeting sequence with TTCN PAM
caggccuguguucaaagcca

SEQ ID NO: 24236 - RNA, 20 nt, Artificial Sequence
  targeting sequence with TTCN PAM
aagccagugccaggcacagc

SEQ ID NO: 24237 - RNA, 20 nt, Artificial Sequence
  targeting sequence with TTCN PAM
gauggaagguacuggcuucu

SEQ ID NO: 24238 - RNA, 20 nt, Artificial Sequence
  targeting sequence with TTCN PAM
aucagaaacucuguaucgcu

SEQ ID NO: 24239 - RNA, 20 nt, Artificial Sequence
  targeting sequence with TTCN PAM
aggugucucccugucugaau

SEQ ID NO: 24240 - RNA, 20 nt, Artificial Sequence
  targeting sequence with TTCN PAM
gacagggagacaccuagaag

SEQ ID NO: 24241 - RNA, 20 nt, Artificial Sequence
  targeting sequence with TTCN PAM
ccucccaggaagaucucuga

SEQ ID NO: 24242 - RNA, 20 nt, Artificial Sequence
  targeting sequence with TTCN PAM
ugggaggggaaccaaaagau

SEQ ID NO: 24243 - RNA, 20 nt, Artificial Sequence
  targeting sequence with TTCN PAM
caggaccaggccaggcccau

SEQ ID NO: 24244 - RNA, 20 nt, Artificial Sequence
  targeting sequence with TTCN PAM
ucgacgccugcuccaucucu

SEQ ID NO: 24245 - RNA, 20 nt, Artificial Sequence
  targeting sequence with TTCN PAM
gucaucgcgcaggccuucau

SEQ ID NO: 24246 - RNA, 20 nt, Artificial Sequence
  targeting sequence with TTCN PAM
ucaggauguucacccagaac

SEQ ID NO: 24247 - RNA, 20 nt, Artificial Sequence
  targeting sequence with TTCN PAM
ggauguucacccagaaccgg

SEQ ID NO: 24248 - RNA, 20 nt, Artificial Sequence
  targeting sequence with TTCN PAM
cccagaaccggagaggaagg

SEQ ID NO: 24249 - RNA, 20 nt, Artificial Sequence
  targeting sequence with TTCN PAM
gggugaacauccugaagaac

SEQ ID NO: 24250 - RNA, 20 nt, Artificial Sequence
  targeting sequence with TTCN PAM
ucuccgguucugggugaaca

SEQ ID NO: 24251 - RNA, 20 nt, Artificial Sequence
  targeting sequence with TTCN PAM
uaccccacccuacccucacu

SEQ ID NO: 24252 - RNA, 20 nt, Artificial Sequence
  targeting sequence with TTCN PAM
caaaggucacaucuugugac

SEQ ID NO: 24253 - RNA, 20 nt, Artificial Sequence
  targeting sequence with TTCN PAM
ugcuggagcaaggcaggagc

SEQ ID NO: 24254 - RNA, 20 nt, Artificial Sequence
  targeting sequence with TTCN PAM
cauuagaaccaggugccggc

SEQ ID NO: 24255 - RNA, 20 nt, Artificial Sequence
  targeting sequence with TTCN PAM
aaugagaaccaggaccugac

SEQ ID NO: 24256 - RNA, 20 nt, Artificial Sequence
  targeting sequence with TTCN PAM
gggaggagccaggggugccc

SEQ ID NO: 24257 - RNA, 20 nt, Artificial Sequence
  targeting sequence with TTCN PAM
ugcugccugcaaggguucag

SEQ ID NO: 24258 - RNA, 20 nt, Artificial Sequence
  targeting sequence with TTCN PAM
uagagcucuggggguacaca

SEQ ID NO: 24259 - RNA, 20 nt, Artificial Sequence
  targeting sequence with TTCN PAM
uccugagggucaggcugggu

SEQ ID NO: 24260 - RNA, 20 nt, Artificial Sequence
  targeting sequence with TTCN PAM
ugagggucaggcuggguuuc

SEQ ID NO: 24261 - RNA, 20 nt, Artificial Sequence
  targeting sequence with TTCN PAM
agcaacuucuugugggggug

SEQ ID NO: 24262 - RNA, 20 nt, Artificial Sequence
  targeting sequence with TTCN PAM
ugugggggugcaugaccccg

SEQ ID NO: 24263 - RNA, 20 nt, Artificial Sequence
  targeting sequence with TTCN PAM
gauaauguagggccgagccu

SEQ ID NO: 24264 - RNA, 20 nt, Artificial Sequence
  targeting sequence with TTCN PAM
ccgagccucagugugcuuau

SEQ ID NO: 24265 - RNA, 20 nt, Artificial Sequence
  targeting sequence with TTCN PAM
cagauaagcacacugaggcu

SEQ ID NO: 24266 - RNA, 20 nt, Artificial Sequence
  targeting sequence with TTCN PAM
cccgcaccccucucaggugg

SEQ ID NO: 24267 - RNA, 20 nt, Artificial Sequence
  targeting sequence with TTCN PAM
gggcacucuucuaguuaauu

SEQ ID NO: 24268 - RNA, 20 nt, Artificial Sequence
  targeting sequence with TTCN PAM
aguuaauucccaccauuaac

SEQ ID NO: 24269 - RNA, 20 nt, Artificial Sequence
  targeting sequence with TTCN PAM
caccauuaacaugggucgca

SEQ ID NO: 24270 - RNA, 20 nt, Artificial Sequence
  targeting sequence with TTCN PAM
ccuccacuguaaaaugcgac

SEQ ID NO: 24271 - RNA, 20 nt, Artificial Sequence
  targeting sequence with TTCN PAM
guuuccccuccacuguaaaa

SEQ ID NO: 24272 - RNA, 20 nt, Artificial Sequence
  targeting sequence with TTCN PAM
cggaugagugacuuagccuc

SEQ ID NO: 24273 - RNA, 20 nt, Artificial Sequence
  targeting sequence with TTCN PAM
cagcuguguguucucggaug

SEQ ID NO: 24274 - RNA, 20 nt, Artificial Sequence
  targeting sequence with TTCN PAM
ggccucgccugcuugggguc

SEQ ID NO: 24275 - RNA, 20 nt, Artificial Sequence
  targeting sequence with TTCN PAM
gagucuagucuucuggccuc

SEQ ID NO: 24276 - RNA, 20 nt, Artificial Sequence
  targeting sequence with TTCN PAM
cugugccacuggggccccug

SEQ ID NO: 24277 - RNA, 20 nt, Artificial Sequence
  targeting sequence with TTCN PAM
agauguguagggugucgggg

SEQ ID NO: 24278 - RNA, 20 nt, Artificial Sequence
  targeting sequence with TTCN PAM
ccucuucucagccugcuccu

SEQ ID NO: 24279 - RNA, 20 nt, Artificial Sequence
  targeting sequence with TTCN PAM
cagccugcuccuccaggaag

SEQ ID NO: 24280 - RNA, 20 nt, Artificial Sequence
  targeting sequence with TTCN PAM
uggaggagcaggcugagaag

SEQ ID NO: 24281 - RNA, 20 nt, Artificial Sequence
  targeting sequence with TTCN PAM
acuuccuggaggagcaggcu

SEQ ID NO: 24282 - RNA, 20 nt, Artificial Sequence
  targeting sequence with TTCN PAM
cggauacucagaauggccuu

SEQ ID NO: 24283 - RNA, 20 nt, Artificial Sequence
  targeting sequence with TTCN PAM
gaguauccgugaagacaagc

SEQ ID NO: 24284 - RNA, 20 nt, Artificial Sequence
  targeting sequence with TTCN PAM
aggccauucugaguauccgu

SEQ ID NO: 24285 - RNA, 20 nt, Artificial Sequence
  targeting sequence with TTCN PAM
ggaugaccuguucaaggcca

SEQ ID NO: 24286 - RNA, 20 nt, Artificial Sequence
  targeting sequence with TTCN PAM
gcaacgugcccugcggggga

SEQ ID NO: 24287 - RNA, 20 nt, Artificial Sequence
  targeting sequence with TTCN PAM
agcuccgcagagccaccaag

SEQ ID NO: 24288 - RNA, 20 nt, Artificial Sequence
  targeting sequence with TTCN PAM
gcagccuggcauuucaagcu

SEQ ID NO: 24289 - RNA, 20 nt, Artificial Sequence
  targeting sequence with TTCN PAM
ucauucagcagccuggcauu

SEQ ID NO: 24290 - RNA, 20 nt, Artificial Sequence
  targeting sequence with TTCN PAM
acgccucugggaggcaagug

SEQ ID NO: 24291 - RNA, 20 nt, Artificial Sequence
  targeting sequence with TTCN PAM
cgacuccaugugccagugcc

SEQ ID NO: 24292 - RNA, 20 nt, Artificial Sequence
  targeting sequence with TTCN PAM
aguucucgacuccaugugcc

SEQ ID NO: 24293 - RNA, 20 nt, Artificial Sequence
  targeting sequence with TTCN PAM
auguuagcccacguaacagg

SEQ ID NO: 24294 - RNA, 20 nt, Artificial Sequence
  targeting sequence with TTCN PAM
uggcugugagaaaugccucc

SEQ ID NO: 24295 - RNA, 20 nt, Artificial Sequence
  targeting sequence with TTCN PAM
cacagccaggaaaaaugccu

SEQ ID NO: 24296 - RNA, 20 nt, Artificial Sequence
  targeting sequence with TTCN PAM
gccucuugccccuccagccc

SEQ ID NO: 24297 - RNA, 20 nt, Artificial Sequence
  targeting sequence with TTCN PAM
ccuguggggcuggaggggca

SEQ ID NO: 24298 - RNA, 20 nt, Artificial Sequence
  targeting sequence with TTCN PAM
uguuuccccuguggggcugg

SEQ ID NO: 24299 - RNA, 20 nt, Artificial Sequence
  targeting sequence with TTCN PAM
uccuguuuccccuguggggc

SEQ ID NO: 24300 - RNA, 20 nt, Artificial Sequence
  targeting sequence with TTCN PAM
gggagcaccuucuugcgaug

SEQ ID NO: 24301 - RNA, 20 nt, Artificial Sequence
  targeting sequence with TTCN PAM
ugcgauggcucugccgguga

SEQ ID NO: 24302 - RNA, 20 nt, Artificial Sequence
  targeting sequence with TTCN PAM
ugggcuccgccagcucgucc

SEQ ID NO: 24303 - RNA, 20 nt, Artificial Sequence
  targeting sequence with TTCN PAM
uagcacacaagggcuguggu

SEQ ID NO: 24304 - RNA, 20 nt, Artificial Sequence
  targeting sequence with TTCN PAM
cuccugauucugggccccau

SEQ ID NO: 24305 - RNA, 20 nt, Artificial Sequence
  targeting sequence with TTCN PAM
gggccccaucccuacucccc

SEQ ID NO: 24306 - RNA, 20 nt, Artificial Sequence
  targeting sequence with TTCN PAM
cagggcugggagcacuuuuc

SEQ ID NO: 24307 - RNA, 20 nt, Artificial Sequence
  targeting sequence with TTCN PAM
caagaggcccagggccacag

SEQ ID NO: 24308 - RNA, 20 nt, Artificial Sequence
  targeting sequence with TTCN PAM
guggcccugggccucuuggg

SEQ ID NO: 24309 - RNA, 20 nt, Artificial Sequence
  targeting sequence with TTCN PAM
auuuggugagugcccaaccu

SEQ ID NO: 24310 - RNA, 20 nt, Artificial Sequence
  targeting sequence with TTCN PAM
cuguguccaagucuuucacu

SEQ ID NO: 24311 - RNA, 20 nt, Artificial Sequence
  targeting sequence with TTCN PAM
cugugagaggaaaaacacaa

SEQ ID NO: 24312 - RNA, 20 nt, Artificial Sequence
  targeting sequence with TTCN PAM
ucucacagugaaagacuugg

SEQ ID NO: 24313 - RNA, 20 nt, Artificial Sequence
  targeting sequence with TTCN PAM
cuccucuccucucccguguu

SEQ ID NO: 24314 - RNA, 20 nt, Artificial Sequence
  targeting sequence with TTCN PAM
guuucucuccucuccucucc

SEQ ID NO: 24315 - RNA, 20 nt, Artificial Sequence
  targeting sequence with TTCN PAM
uuucuguuucucuccucucc

SEQ ID NO: 24316 - RNA, 20 nt, Artificial Sequence
  targeting sequence with TTCN PAM
gucuucauuucuguuucucu

SEQ ID NO: 24317 - RNA, 20 nt, Artificial Sequence
  targeting sequence with TTCN PAM
cacuccaucuuucugucuuc

SEQ ID NO: 24318 - RNA, 20 nt, Artificial Sequence
  targeting sequence with TTCN PAM
guuucucacuccaucuuucu

SEQ ID NO: 24319 - RNA, 20 nt, Artificial Sequence
  targeting sequence with TTCN PAM
gucuuguuucuguuucucac

SEQ ID NO: 24320 - RNA, 20 nt, Artificial Sequence
  targeting sequence with TTCN PAM
cuccccaucuuucugucuug

SEQ ID NO: 24321 - RNA, 20 nt, Artificial Sequence
  targeting sequence with TTCN PAM
guuucucuccccaucuuucu

SEQ ID NO: 24322 - RNA, 20 nt, Artificial Sequence
  targeting sequence with TTCN PAM
gucucugcuucuguuucucu

SEQ ID NO: 24323 - RNA, 20 nt, Artificial Sequence
  targeting sequence with TTCN PAM
cucuccaucuuucugucucu

SEQ ID NO: 24324 - RNA, 20 nt, Artificial Sequence
  targeting sequence with TTCN PAM
guuucucucuccaucuuucu

SEQ ID NO: 24325 - RNA, 20 nt, Artificial Sequence
  targeting sequence with TTCN PAM
cucugacugucucuuuggau

SEQ ID NO: 24326 - RNA, 20 nt, Artificial Sequence
  targeting sequence with TTCN PAM
cucucugccucacucugucu

SEQ ID NO: 24327 - RNA, 20 nt, Artificial Sequence
  targeting sequence with TTCN PAM
aagucccuccaucccggguc

SEQ ID NO: 24328 - RNA, 20 nt, Artificial Sequence
  targeting sequence with TTCN PAM
cuccaccgcugucccuccuu

SEQ ID NO: 24329 - RNA, 20 nt, Artificial Sequence
  targeting sequence with TTCN PAM
uguuucucuccaccgcuguc

SEQ ID NO: 24330 - RNA, 20 nt, Artificial Sequence
  targeting sequence with TTCN PAM
caggcugcugggagagacug

SEQ ID NO: 24331 - RNA, 20 nt, Artificial Sequence
  targeting sequence with TTCN PAM
aagguugagagcagagucuc

SEQ ID NO: 24332 - RNA, 20 nt, Artificial Sequence
  targeting sequence with TTCN PAM
ggccuggcugcugcccagac

SEQ ID NO: 24333 - RNA, 20 nt, Artificial Sequence
  targeting sequence with TTCN PAM
aggaggucugggcagcagcc

SEQ ID NO: 24334 - RNA, 20 nt, Artificial Sequence
  targeting sequence with TTCN PAM
ugcggcagcuggagagaggc

SEQ ID NO: 24335 - RNA, 20 nt, Artificial Sequence
  targeting sequence with TTCN PAM
ccacuggggcaugggaugga

SEQ ID NO: 24336 - RNA, 20 nt, Artificial Sequence
  targeting sequence with TTCN PAM
aucccaugccccagugggga

SEQ ID NO: 24337 - RNA, 20 nt, Artificial Sequence
  targeting sequence with TTCN PAM
cacgugcacccgcacuaccu

SEQ ID NO: 24338 - RNA, 20 nt, Artificial Sequence
  targeting sequence with TTCN PAM
ugucuaugagacucauggcc

SEQ ID NO: 24339 - RNA, 20 nt, Artificial Sequence
  targeting sequence with TTCN PAM
gggaucugaugggaggggag

SEQ ID NO: 24340 - RNA, 20 nt, Artificial Sequence
  targeting sequence with TTCN PAM
ccacccucaugcccccaccc

SEQ ID NO: 24341 - RNA, 20 nt, Artificial Sequence
  targeting sequence with TTCN PAM
ugcggccgucuuccaccacu

SEQ ID NO: 24342 - RNA, 20 nt, Artificial Sequence
  targeting sequence with TTCN PAM
accacugaggugucguccag

SEQ ID NO: 24343 - RNA, 20 nt, Artificial Sequence
  targeting sequence with TTCN PAM
ggaccuggacgacaccucag

SEQ ID NO: 24344 - RNA, 20 nt, Artificial Sequence
  targeting sequence with TTCN PAM
ccuccagcacacagagcuac

SEQ ID NO: 24345 - RNA, 20 nt, Artificial Sequence
  targeting sequence with TTCN PAM
caucuguaaaauggggaggg

SEQ ID NO: 24346 - RNA, 20 nt, Artificial Sequence
  targeting sequence with TTCN PAM
ugcccuccccauuuuacaga

SEQ ID NO: 24347 - RNA, 20 nt, Artificial Sequence
  targeting sequence with TTCN PAM
cuuuguacccucacacucuc

SEQ ID NO: 24348 - RNA, 20 nt, Artificial Sequence
  targeting sequence with TTCN PAM
agagcuccuccucugugccc

SEQ ID NO: 24349 - RNA, 20 nt, Artificial Sequence
  targeting sequence with TTCN PAM
uguuacaauugcugaugaaa

SEQ ID NO: 24350 - RNA, 20 nt, Artificial Sequence
  targeting sequence with TTCN PAM
ucagcaauuguaacaugaac

SEQ ID NO: 24351 - RNA, 20 nt, Artificial Sequence
  targeting sequence with TTCN PAM
agaccagccugggcagcaca

SEQ ID NO: 24352 - RNA, 20 nt, Artificial Sequence
  targeting sequence with TTCN PAM
gccuccugaguagcugggac

SEQ ID NO: 24353 - RNA, 20 nt, Artificial Sequence
  targeting sequence with TTCN PAM
gucacccaggcuggagugca

SEQ ID NO: 24354 - RNA, 20 nt, Artificial Sequence
  targeting sequence with TTCN PAM
uaaaggagggaugcuggagu

SEQ ID NO: 24355 - RNA, 20 nt, Artificial Sequence
  targeting sequence with TTCN PAM
uaauuccuaaaggagggaug

SEQ ID NO: 24356 - RNA, 20 nt, Artificial Sequence
  targeting sequence with TTCN PAM
ugaaggcuuuuugcuguugu

SEQ ID NO: 24357 - RNA, 20 nt, Artificial Sequence
  targeting sequence with TTCN PAM
ggaaaggcuuccuaauuccu

SEQ ID NO: 24358 - RNA, 20 nt, Artificial Sequence
  targeting sequence with TTCN PAM
cucacacugcaggacuuguc

SEQ ID NO: 24359 - RNA, 20 nt, Artificial Sequence
  targeting sequence with TTCN PAM
ugcugagggggccucauugg

SEQ ID NO: 24360 - RNA, 20 nt, Artificial Sequence
  targeting sequence with TTCN PAM
ugcacccaugccaggugaaa

SEQ ID NO: 24361 - RNA, 20 nt, Artificial Sequence
  targeting sequence with TTCN PAM
ccuggcaugggugcaugaau

SEQ ID NO: 24362 - RNA, 20 nt, Artificial Sequence
  targeting sequence with TTCN PAM
cgucaaggcaggggccagcc

SEQ ID NO: 24363 - RNA, 20 nt, Artificial Sequence
  targeting sequence with TTCN PAM
gccggggcuggccccugccu

SEQ ID NO: 24364 - RNA, 20 nt, Artificial Sequence
  targeting sequence with TTCN PAM
cacccaccaaggucgacguc

SEQ ID NO: 24365 - RNA, 20 nt, Artificial Sequence
  targeting sequence with TTCN PAM
ugcagaaggccuccaggauc

SEQ ID NO: 24366 - RNA, 20 nt, Artificial Sequence
  targeting sequence with TTCN PAM
gcaagaaugugcccuacucc

SEQ ID NO: 24367 - RNA, 20 nt, Artificial Sequence
  targeting sequence with TTCN PAM
ccuugaccugugucagcgug

SEQ ID NO: 24368 - RNA, 20 nt, Artificial Sequence
  targeting sequence with TTCN PAM
agggcuguggcauggacucg

SEQ ID NO: 24369 - RNA, 20 nt, Artificial Sequence
  targeting sequence with TTCN PAM
gguucugcagggggagagug

SEQ ID NO: 24370 - RNA, 20 nt, Artificial Sequence
  targeting sequence with TTCN PAM
gcagggggagagugggagag

SEQ ID NO: 24371 - RNA, 20 nt, Artificial Sequence
  targeting sequence with TTCN PAM
cucccacucucccccugcag

SEQ ID NO: 24372 - RNA, 20 nt, Artificial Sequence
  targeting sequence with TTCN PAM
cccgcagcagccacuccuca

SEQ ID NO: 24373 - RNA, 20 nt, Artificial Sequence
  targeting sequence with TTCN PAM
ugcugcugugugccaucaag

SEQ ID NO: 24374 - RNA, 20 nt, Artificial Sequence
  targeting sequence with TTCN PAM
uccugcugcugugugccauc

SEQ ID NO: 24375 - RNA, 20 nt, Artificial Sequence
  targeting sequence with TTCN PAM
uacugugcagccaacagugc

SEQ ID NO: 24376 - RNA, 20 nt, Artificial Sequence
  targeting sequence with TTCN PAM
cagcugggugaucuugggca

SEQ ID NO: 24377 - RNA, 20 nt, Artificial Sequence
  targeting sequence with TTCN PAM
acuaaguggggggcccccaa

SEQ ID NO: 24378 - RNA, 20 nt, Artificial Sequence
  targeting sequence with TTCN PAM
gguccaccuaaacucacacu

SEQ ID NO: 24379 - RNA, 20 nt, Artificial Sequence
  targeting sequence with TTCN PAM
uccugagacuccauagucau

SEQ ID NO: 24380 - RNA, 20 nt, Artificial Sequence
  targeting sequence with TTCN PAM
caaggccauugcccagcaag

SEQ ID NO: 24381 - RNA, 20 nt, Artificial Sequence
  targeting sequence with TTCN PAM
acugggauaguuuuacuuaa

SEQ ID NO: 24382 - RNA, 20 nt, Artificial Sequence
  targeting sequence with TTCN PAM
uuaaaucaauuuuuguggau

SEQ ID NO: 24383 - RNA, 20 nt, Artificial Sequence
  targeting sequence with TTCN PAM
uaaucuuugccaaaucugcc

SEQ ID NO: 24384 - RNA, 20 nt, Artificial Sequence
  targeting sequence with TTCN PAM
ccaggucuggggcgugggag

SEQ ID NO: 24385 - RNA, 20 nt, Artificial Sequence
  targeting sequence with TTCN PAM
cugcuuccuagaggaggaaa

SEQ ID NO: 24386 - RNA, 20 nt, Artificial Sequence
  targeting sequence with TTCN PAM
uagaggaggaaacaggcuca

SEQ ID NO: 24387 - RNA, 20 nt, Artificial Sequence
  targeting sequence with TTCN PAM
uccucuaggaagcagggaau

SEQ ID NO: 24388 - RNA, 20 nt, Artificial Sequence
  targeting sequence with TTCN PAM
ccuaugagccuguuuccucc

SEQ ID NO: 24389 - RNA, 20 nt, Artificial Sequence
  targeting sequence with TTCN PAM
guggccucagccaggccuuc

SEQ ID NO: 24390 - RNA, 20 nt, Artificial Sequence
  targeting sequence with TTCN PAM
uucuguggccucagccaggc

SEQ ID NO: 24391 - RNA, 20 nt, Artificial Sequence
  targeting sequence with TTCN PAM
ugauggcccacagugaggca

SEQ ID NO: 24392 - RNA, 20 nt, Artificial Sequence
  targeting sequence with TTCN PAM
gcgggcugccucacuguggg

SEQ ID NO: 24393 - RNA, 20 nt, Artificial Sequence
  targeting sequence with TTCN PAM
cccaggaggagccguggggc

SEQ ID NO: 24394 - RNA, 20 nt, Artificial Sequence
  targeting sequence with TTCN PAM
gucaaauggggccucugccc

SEQ ID NO: 24395 - RNA, 20 nt, Artificial Sequence
  targeting sequence with TTCN PAM
uucugucaaauggggccucu

SEQ ID NO: 24396 - RNA, 20 nt, Artificial Sequence
  targeting sequence with TTCN PAM
aaaauuaauaacaaaaaaca

SEQ ID NO: 24397 - RNA, 20 nt, Artificial Sequence
  targeting sequence with TTCN PAM
guuuuuuguuauuaauuuuu

SEQ ID NO: 24398 - RNA, 20 nt, Artificial Sequence
  targeting sequence with TTCN PAM
gggcuccaggcaggccuuug

SEQ ID NO: 24399 - RNA, 20 nt, Artificial Sequence
  targeting sequence with TTCN PAM
cccacaauccuccaggcagc

SEQ ID NO: 24400 - RNA, 20 nt, Artificial Sequence
  targeting sequence with TTCN PAM
cagagcaaggguugcuuagc

SEQ ID NO: 24401 - RNA, 20 nt, Artificial Sequence
  targeting sequence with TTCN PAM
ggcagagugcaggaggcccu

SEQ ID NO: 24402 - RNA, 20 nt, Artificial Sequence
  targeting sequence with TTCN PAM
cagccuccgcucucauccag

SEQ ID NO: 24403 - RNA, 20 nt, Artificial Sequence
  targeting sequence with TTCN PAM
ggaugagagcggaggcuggg

SEQ ID NO: 24404 - RNA, 20 nt, Artificial Sequence
  targeting sequence with TTCN PAM
uuggccuuccuucuauuccu

SEQ ID NO: 24405 - RNA, 20 nt, Artificial Sequence
  targeting sequence with TTCN PAM
uucuauuccuuccacgaaca

SEQ ID NO: 24406 - RNA, 20 nt, Artificial Sequence
  targeting sequence with TTCN PAM
auuccuuccacgaacauccc

SEQ ID NO: 24407 - RNA, 20 nt, Artificial Sequence
  targeting sequence with TTCN PAM
uuccacgaacauccccuccu

SEQ ID NO: 24408 - RNA, 20 nt, Artificial Sequence
  targeting sequence with TTCN PAM
acgaacauccccuccucccg

SEQ ID NO: 24409 - RNA, 20 nt, Artificial Sequence
  targeting sequence with TTCN PAM
uggaaggaauagaaggaagg

SEQ ID NO: 24410 - RNA, 20 nt, Artificial Sequence
  targeting sequence with TTCN PAM
uggagcaggcaacccugugc

SEQ ID NO: 24411 - RNA, 20 nt, Artificial Sequence
  targeting sequence with TTCN PAM
agguggcuuccuggagcagg

SEQ ID NO: 24412 - RNA, 20 nt, Artificial Sequence
  targeting sequence with TTCN PAM
gacagagggaggccucguga

SEQ ID NO: 24413 - RNA, 20 nt, Artificial Sequence
  targeting sequence with TTCN PAM
acgucucgccuagccuaggg

SEQ ID NO: 24414 - RNA, 20 nt, Artificial Sequence
  targeting sequence with TTCN PAM
ucuccugaauccagagcagg

SEQ ID NO: 24415 - RNA, 20 nt, Artificial Sequence
  targeting sequence with TTCN PAM
ggagaugaaaucagccccug

SEQ ID NO: 24416 - RNA, 20 nt, Artificial Sequence
  targeting sequence with TTCN PAM
cugcucuggauucaggagau

SEQ ID NO: 24417 - RNA, 20 nt, Artificial Sequence
  targeting sequence with TTCN PAM
cagucauccacccuucccug

SEQ ID NO: 24418 - RNA, 20 nt, Artificial Sequence
  targeting sequence with TTCN PAM
ccggggccauggcuccccuc

SEQ ID NO: 24419 - RNA, 20 nt, Artificial Sequence
  targeting sequence with TTCN PAM
cuggcacccucaggccagcu

SEQ ID NO: 24420 - RNA, 20 nt, Artificial Sequence
  targeting sequence with TTCN PAM
ccaccacagacucugugcgc

SEQ ID NO: 24421 - RNA, 20 nt, Artificial Sequence
  targeting sequence with TTCN PAM
uggcggccgaggcgucaaug

SEQ ID NO: 24422 - RNA, 20 nt, Artificial Sequence
  targeting sequence with TTCN PAM
ugaugcugguguaguacucc

SEQ ID NO: 24423 - RNA, 20 nt, Artificial Sequence
  targeting sequence with TTCN PAM
cuaccccaccccagucuguc

SEQ ID NO: 24424 - RNA, 20 nt, Artificial Sequence
  targeting sequence with TTCN PAM
gcugcuccagcgcguggaca

SEQ ID NO: 24425 - RNA, 20 nt, Artificial Sequence
  targeting sequence with TTCN PAM
ucaucgucuuuguccacgcg

SEQ ID NO: 24426 - RNA, 20 nt, Artificial Sequence
  targeting sequence with TTCN PAM
ccucacuacucaacaacaag

SEQ ID NO: 24427 - RNA, 20 nt, Artificial Sequence
  targeting sequence with TTCN PAM
cucuuccauguugggccggc

SEQ ID NO: 24428 - RNA, 20 nt, Artificial Sequence
  targeting sequence with TTCN PAM
auguugggccggcagcucuc

SEQ ID NO: 24429 - RNA, 20 nt, Artificial Sequence
  targeting sequence with TTCN PAM
ugagagcugccggcccaaca

SEQ ID NO: 24430 - RNA, 20 nt, Artificial Sequence
  targeting sequence with TTCN PAM
acagauuccugagagcugcc

SEQ ID NO: 24431 - RNA, 20 nt, Artificial Sequence
  targeting sequence with TTCN PAM
acgguggaugccuccuaacc

SEQ ID NO: 24432 - RNA, 20 nt, Artificial Sequence
  targeting sequence with TTCN PAM
gggcaacccugcuccccccu

SEQ ID NO: 24433 - RNA, 20 nt, Artificial Sequence
  targeting sequence with TTCN PAM
acucucccagcagugggugg

SEQ ID NO: 24434 - RNA, 20 nt, Artificial Sequence
  targeting sequence with TTCN PAM
ugugccugggagcugcccug

SEQ ID NO: 24435 - RNA, 20 nt, Artificial Sequence
  targeting sequence with TTCN PAM
uaaagggaggaacacugcag

SEQ ID NO: 24436 - RNA, 20 nt, Artificial Sequence
  targeting sequence with TTCN PAM
ucccuuuaugaagagcguua

SEQ ID NO: 24437 - RNA, 20 nt, Artificial Sequence
  targeting sequence with TTCN PAM
augccagcagggggugucca

SEQ ID NO: 24438 - RNA, 20 nt, Artificial Sequence
  targeting sequence with TTCN PAM
gugugagugaccuuuccaug

SEQ ID NO: 24439 - RNA, 20 nt, Artificial Sequence
  targeting sequence with TTCN PAM
cccagcagcccaagccagug

SEQ ID NO: 24440 - RNA, 20 nt, Artificial Sequence
  targeting sequence with TTCN PAM
gugccaguuucccccagcag

SEQ ID NO: 24441 - RNA, 20 nt, Artificial Sequence
  targeting sequence with TTCN PAM
acagcccccaggcuuggccc

SEQ ID NO: 24442 - RNA, 20 nt, Artificial Sequence
  targeting sequence with TTCN PAM
agggguguggccacacaaga

SEQ ID NO: 24443 - RNA, 20 nt, Artificial Sequence
  targeting sequence with TTCN PAM
ccuuaagucuugugcugucu

SEQ ID NO: 24444 - RNA, 20 nt, Artificial Sequence
  targeting sequence with TTCN PAM
cccauugcacauggagcugc

SEQ ID NO: 24445 - RNA, 20 nt, Artificial Sequence
  targeting sequence with TTCN PAM
gccucaguuucccccauugc

SEQ ID NO: 24446 - RNA, 20 nt, Artificial Sequence
  targeting sequence with TTCN PAM
cagccucaggcuaaagcuca

SEQ ID NO: 24447 - RNA, 20 nt, Artificial Sequence
  targeting sequence with TTCN PAM
ugaaaaaugauguagucaaa

SEQ ID NO: 24448 - RNA, 20 nt, Artificial Sequence
  targeting sequence with TTCN PAM
cgaaacccuccaguagcuuu

SEQ ID NO: 24449 - RNA, 20 nt, Artificial Sequence
  targeting sequence with TTCN PAM
ccacacaguggccaaagcaa

SEQ ID NO: 24450 - RNA, 20 nt, Artificial Sequence
  targeting sequence with TTCN PAM
aggguccacuacccucacuc

SEQ ID NO: 24451 - RNA, 20 nt, Artificial Sequence
  targeting sequence with TTCN PAM
augccucucaugccuccccu

SEQ ID NO: 24452 - RNA, 20 nt, Artificial Sequence
  targeting sequence with TTCN PAM
cuuggucucuacacucccuc

SEQ ID NO: 24453 - RNA, 20 nt, Artificial Sequence
  targeting sequence with TTCN PAM
cagccaggcuucccuugguc

SEQ ID NO: 24454 - RNA, 20 nt, Artificial Sequence
  targeting sequence with TTCN PAM
ugugccucuucccagccagg

SEQ ID NO: 24455 - RNA, 20 nt, Artificial Sequence
  targeting sequence with TTCN PAM
gccccaccuugaaaagggga

SEQ ID NO: 24456 - RNA, 20 nt, Artificial Sequence
  targeting sequence with TTCN PAM
agguggggcagaagcggcca

SEQ ID NO: 24457 - RNA, 20 nt, Artificial Sequence
  targeting sequence with TTCN PAM
auauggacuguuaaacauca

SEQ ID NO: 24458 - RNA, 20 nt, Artificial Sequence
  targeting sequence with TTCN PAM
cugcucacuugauguuuaac

SEQ ID NO: 24459 - RNA, 20 nt, Artificial Sequence
  targeting sequence with TTCN PAM
ccacugucauucucugcuca

SEQ ID NO: 24460 - RNA, 20 nt, Artificial Sequence
  targeting sequence with TTCN PAM
ccccguggcaggccagggca

SEQ ID NO: 24461 - RNA, 20 nt, Artificial Sequence
  targeting sequence with TTCN PAM
gggcaggcucaggcucgggc

SEQ ID NO: 24462 - RNA, 20 nt, Artificial Sequence
  targeting sequence with TTCN PAM
ccaaggucagcccgagccug

SEQ ID NO: 24463 - RNA, 20 nt, Artificial Sequence
  targeting sequence with TTCN PAM
uccccaaggucagcccgagc

SEQ ID NO: 24464 - RNA, 20 nt, Artificial Sequence
  targeting sequence with TTCN PAM
ugacccgcaccuucuucccc

SEQ ID NO: 24465 - RNA, 20 nt, Artificial Sequence
  targeting sequence with TTCN PAM
uggaguauaagcacuucgug

SEQ ID NO: 24466 - RNA, 20 nt, Artificial Sequence
  targeting sequence with TTCN PAM
gcuccuuggugagaucuguc

SEQ ID NO: 24467 - RNA, 20 nt, Artificial Sequence
  targeting sequence with TTCN PAM
cugagcugcagacagacaug

SEQ ID NO: 24468 - RNA, 20 nt, Artificial Sequence
  targeting sequence with TTCN PAM
cgggccgcucacggcugucc

SEQ ID NO: 24469 - RNA, 20 nt, Artificial Sequence
  targeting sequence with TTCN PAM
cuccuaggggauggguucuc

SEQ ID NO: 24470 - RNA, 20 nt, Artificial Sequence
  targeting sequence with TTCN PAM
ucucggaucugagauuccau

SEQ ID NO: 24471 - RNA, 20 nt, Artificial Sequence
  targeting sequence with TTCN PAM
aucuccuccaucugcagcag

SEQ ID NO: 24472 - RNA, 20 nt, Artificial Sequence
  targeting sequence with TTCN PAM
gccaguaacgcucagcacgu

SEQ ID NO: 24473 - RNA, 20 nt, Artificial Sequence
  targeting sequence with TTCN PAM
guaccaagagccgacgugcu

SEQ ID NO: 24474 - RNA, 20 nt, Artificial Sequence
  targeting sequence with TTCN PAM
ucuucuguaccaagagccga

SEQ ID NO: 24475 - RNA, 20 nt, Artificial Sequence
  targeting sequence with TTCN PAM
aaagggcaccagaggccuga

SEQ ID NO: 24476 - RNA, 20 nt, Artificial Sequence
  targeting sequence with TTCN PAM
ggccuccgcuccagcuccuc

SEQ ID NO: 24477 - RNA, 20 nt, Artificial Sequence
  targeting sequence with TTCN PAM
ccaagcccucuguccacggg

SEQ ID NO: 24478 - RNA, 20 nt, Artificial Sequence
  targeting sequence with TTCN PAM
aaggacgggucaucaggcau

SEQ ID NO: 24479 - RNA, 20 nt, Artificial Sequence
  targeting sequence with TTCN PAM
uuuucuaaggacgggucauc

SEQ ID NO: 24480 - RNA, 20 nt, Artificial Sequence
  targeting sequence with TTCN PAM
aacagagcuguaacacuaca

SEQ ID NO: 24481 - RNA, 20 nt, Artificial Sequence
  targeting sequence with TTCN PAM
uuuuuuuuuuaacggggcua

SEQ ID NO: 24482 - RNA, 20 nt, Artificial Sequence
  targeting sequence with TTCN PAM
uguuucuuuuuuuuuuuaac

SEQ ID NO: 24483 - RNA, 20 nt, Artificial Sequence
  targeting sequence with TTCN PAM
cacacacguauuccuguuuc

SEQ ID NO: 24484 - RNA, 20 nt, Artificial Sequence
  targeting sequence with TTCN PAM
ugggugggaggauucugggu

SEQ ID NO: 24485 - RNA, 20 nt, Artificial Sequence
  targeting sequence with TTCN PAM
gggugacuucgguuuacuuu

SEQ ID NO: 24486 - RNA, 20 nt, Artificial Sequence
  targeting sequence with TTCN PAM
guuuacuuucugcuuuugag

SEQ ID NO: 24487 - RNA, 20 nt, Artificial Sequence
  targeting sequence with TTCN PAM
gcuuuugagcauuuucuauu

SEQ ID NO: 24488 - RNA, 20 nt, Artificial Sequence
  targeting sequence with TTCN PAM
auuccuucuacaaugaccag

SEQ ID NO: 24489 - RNA, 20 nt, Artificial Sequence
  targeting sequence with TTCN PAM
uucuacaaugaccagguguu

SEQ ID NO: 24490 - RNA, 20 nt, Artificial Sequence
  targeting sequence with TTCN PAM
acaaugaccagguguuacuu

SEQ ID NO: 24491 - RNA, 20 nt, Artificial Sequence
  targeting sequence with TTCN PAM
uaauuuacaaguaacaccug

SEQ ID NO: 24492 - RNA, 20 nt, Artificial Sequence
  targeting sequence with TTCN PAM
ugggguggggaggaauauau

SEQ ID NO: 24493 - RNA, 20 nt, Artificial Sequence
  targeting sequence with TTCN PAM
augguuucuaguauauucac

SEQ ID NO: 24494 - RNA, 20 nt, Artificial Sequence
  targeting sequence with TTCN PAM
aguauauucacagaguugug

SEQ ID NO: 24495 - RNA, 20 nt, Artificial Sequence
  targeting sequence with TTCN PAM
cagaguugugcaaccaucac

SEQ ID NO: 24496 - RNA, 20 nt, Artificial Sequence
  targeting sequence with TTCN PAM
uggggcagcaaaaaugcucu

SEQ ID NO: 24497 - RNA, 20 nt, Artificial Sequence
  targeting sequence with TTCN PAM
uguucucccuagucccuggc

SEQ ID NO: 24498 - RNA, 20 nt, Artificial Sequence
  targeting sequence with TTCN PAM
cccuagucccuggcaaucac

SEQ ID NO: 24499 - RNA, 20 nt, Artificial Sequence
  targeting sequence with TTCN PAM
gcuuucugucucuaugaauu

SEQ ID NO: 24500 - RNA, 20 nt, Artificial Sequence
  targeting sequence with TTCN PAM
gucucuaugaauuucccuau

SEQ ID NO: 24501 - RNA, 20 nt, Artificial Sequence
  targeting sequence with TTCN PAM
uagagacagaaagcugaaug

SEQ ID NO: 24502 - RNA, 20 nt, Artificial Sequence
  targeting sequence with TTCN PAM
cuauucuaaacauuucauau

SEQ ID NO: 24503 - RNA, 20 nt, Artificial Sequence
  targeting sequence with TTCN PAM
aaacauuucauauaaauggc

SEQ ID NO: 24504 - RNA, 20 nt, Artificial Sequence
  targeting sequence with TTCN PAM
ugaguaauccucucuuaagu

SEQ ID NO: 24505 - RNA, 20 nt, Artificial Sequence
  targeting sequence with TTCN PAM
guagcucucuauugacugga

SEQ ID NO: 24506 - RNA, 20 nt, Artificial Sequence
  targeting sequence with TTCN PAM
ccagucaauagagagcuacu

SEQ ID NO: 24507 - RNA, 20 nt, Artificial Sequence
  targeting sequence with TTCN PAM
aaauuucucugcuugagauu

SEQ ID NO: 24508 - RNA, 20 nt, Artificial Sequence
  targeting sequence with TTCN PAM
cugcuugagauucagggacc

SEQ ID NO: 24509 - RNA, 20 nt, Artificial Sequence
  targeting sequence with TTCN PAM
gggaccugggcgugggccua

SEQ ID NO: 24510 - RNA, 20 nt, Artificial Sequence
  targeting sequence with TTCN PAM
acccauuggugcuggagcca

SEQ ID NO: 24511 - RNA, 20 nt, Artificial Sequence
  targeting sequence with TTCN PAM
cauggccaagccuuuguuca

SEQ ID NO: 24512 - RNA, 20 nt, Artificial Sequence
  targeting sequence with TTCN PAM
agcugugccccaucccaucc

SEQ ID NO: 24513 - RNA, 20 nt, Artificial Sequence
  targeting sequence with TTCN PAM
cccaucugccaaucuucaga

SEQ ID NO: 24514 - RNA, 20 nt, Artificial Sequence
  targeting sequence with TTCN PAM
gaggggcuggggcaaggugg

SEQ ID NO: 24515 - RNA, 20 nt, Artificial Sequence
  targeting sequence with TTCN PAM
accagaccaucgccacacug

SEQ ID NO: 24516 - RNA, 20 nt, Artificial Sequence
  targeting sequence with TTCN PAM
cuaccuggaucugugcagag

SEQ ID NO: 24517 - RNA, 20 nt, Artificial Sequence
  targeting sequence with TTCN PAM
ccaaccucugcacagaucca

SEQ ID NO: 24518 - RNA, 20 nt, Artificial Sequence
  targeting sequence with TTCN PAM
uggacuuauacucuaguucu

SEQ ID NO: 24519 - RNA, 20 nt, Artificial Sequence
  targeting sequence with TTCN PAM
gcuccucacuugcugugugg

SEQ ID NO: 24520 - RNA, 20 nt, Artificial Sequence
  targeting sequence with TTCN PAM
caguguccccaggaggugga

SEQ ID NO: 24521 - RNA, 20 nt, Artificial Sequence
  targeting sequence with TTCN PAM
ucuugcucacucacuacucc

SEQ ID NO: 24522 - RNA, 20 nt, Artificial Sequence
  targeting sequence with TTCN PAM
cggggccuggcugcuguccc

SEQ ID NO: 24523 - RNA, 20 nt, Artificial Sequence
  targeting sequence with TTCN PAM
ccugcaccucagucccaguc

SEQ ID NO: 24524 - RNA, 20 nt, Artificial Sequence
  targeting sequence with TTCN PAM
uucaccugcaccucaguccc

SEQ ID NO: 24525 - RNA, 20 nt, Artificial Sequence
  targeting sequence with TTCN PAM
cagucagagccauccugggg

SEQ ID NO: 24526 - RNA, 20 nt, Artificial Sequence
  targeting sequence with TTCN PAM
ggccccucucugcuccuccu

SEQ ID NO: 24527 - RNA, 20 nt, Artificial Sequence
  targeting sequence with TTCN PAM
uaugguuucugaugguccag

SEQ ID NO: 24528 - RNA, 20 nt, Artificial Sequence
  targeting sequence with TTCN PAM
gaugguccagguccagaugg

SEQ ID NO: 24529 - RNA, 20 nt, Artificial Sequence
  targeting sequence with TTCN PAM
ugggccucaguuuccucaua

SEQ ID NO: 24530 - RNA, 20 nt, Artificial Sequence
  targeting sequence with TTCN PAM
ucauaugucaaguggggaug

SEQ ID NO: 24531 - RNA, 20 nt, Artificial Sequence
  targeting sequence with TTCN PAM
cgcucaacagcucaguccag

SEQ ID NO: 24532 - RNA, 20 nt, Artificial Sequence
  targeting sequence with TTCN PAM
cugagcguuuucacgcucaa

SEQ ID NO: 24533 - RNA, 20 nt, Artificial Sequence
  targeting sequence with TTCN PAM
ggugcugggugaggggcaga

SEQ ID NO: 24534 - RNA, 20 nt, Artificial Sequence
  targeting sequence with TTCN PAM
gucagagacaaucuggaugu

SEQ ID NO: 24535 - RNA, 20 nt, Artificial Sequence
  targeting sequence with TTCN PAM
gugggugcaaagggggagga

SEQ ID NO: 24536 - RNA, 20 nt, Artificial Sequence
  targeting sequence with TTCN PAM
ccaugagcauccucccccuu

SEQ ID NO: 24537 - RNA, 20 nt, Artificial Sequence
  targeting sequence with TTCN PAM
cccucuuggccguagagaac

SEQ ID NO: 24538 - RNA, 20 nt, Artificial Sequence
  targeting sequence with TTCN PAM
cuacggccaagagggagaag

SEQ ID NO: 24539 - RNA, 20 nt, Artificial Sequence
  targeting sequence with TTCN PAM
gccuggacuaccuccccaac

SEQ ID NO: 24540 - RNA, 20 nt, Artificial Sequence
  targeting sequence with TTCN PAM
ucaaugggcgggccuacgca

SEQ ID NO: 24541 - RNA, 20 nt, Artificial Sequence
  targeting sequence with TTCN PAM
ucaucaaugggcgggccuac

SEQ ID NO: 24542 - RNA, 20 nt, Artificial Sequence
  targeting sequence with TTCN PAM
caacuccacccucaucaccu

SEQ ID NO: 24543 - RNA, 20 nt, Artificial Sequence
  targeting sequence with TTCN PAM
ccaugcccaucuguccaucc

SEQ ID NO: 24544 - RNA, 20 nt, Artificial Sequence
  targeting sequence with TTCN PAM
ucccucugccucugugucuc

SEQ ID NO: 24545 - RNA, 20 nt, Artificial Sequence
  targeting sequence with TTCN PAM
ggggccugaugggugggagg

SEQ ID NO: 24546 - RNA, 20 nt, Artificial Sequence
  targeting sequence with TTCN PAM
gcaccauguggaaacgcuca

SEQ ID NO: 24547 - RNA, 20 nt, Artificial Sequence
  targeting sequence with TTCN PAM
acauggugcagaaugugucc

SEQ ID NO: 24548 - RNA, 20 nt, Artificial Sequence
  targeting sequence with TTCN PAM
cccaggcucucuggggcugc

SEQ ID NO: 24549 - RNA, 20 nt, Artificial Sequence
  targeting sequence with TTCN PAM
gcauguaccagaaggugagg

SEQ ID NO: 24550 - RNA, 20 nt, Artificial Sequence
  targeting sequence with TTCN PAM
gguacaugcagaacccgguc

SEQ ID NO: 24551 - RNA, 20 nt, Artificial Sequence
  targeting sequence with TTCN PAM
agcgucggggcugcgugcac

SEQ ID NO: 24552 - RNA, 20 nt, Artificial Sequence
  targeting sequence with TTCN PAM
gcugcucacccaccgccaau

SEQ ID NO: 24553 - RNA, 20 nt, Artificial Sequence
  targeting sequence with TTCN PAM
aggccuccuugacugguccc

SEQ ID NO: 24554 - RNA, 20 nt, Artificial Sequence
  targeting sequence with TTCN PAM
gcccaguuagugcccagcug

SEQ ID NO: 24555 - RNA, 20 nt, Artificial Sequence
  targeting sequence with TTCN PAM
uuacacuuccaaauuccgcc

SEQ ID NO: 24556 - RNA, 20 nt, Artificial Sequence
  targeting sequence with TTCN PAM
aaauuccgccccaucccacc

SEQ ID NO: 24557 - RNA, 20 nt, Artificial Sequence
  targeting sequence with TTCN PAM
gccccaucccaccuccucca

SEQ ID NO: 24558 - RNA, 20 nt, Artificial Sequence
  targeting sequence with TTCN PAM
uggaggaggugggauggggc

SEQ ID NO: 24559 - RNA, 20 nt, Artificial Sequence
  targeting sequence with TTCN PAM
caggucuucucucccgccuc

SEQ ID NO: 24560 - RNA, 20 nt, Artificial Sequence
  targeting sequence with TTCN PAM
cucccgccuccaacccuggu

SEQ ID NO: 24561 - RNA, 20 nt, Artificial Sequence
  targeting sequence with TTCN PAM
ccaggguuggaggcgggaga

SEQ ID NO: 24562 - RNA, 20 nt, Artificial Sequence
  targeting sequence with TTCN PAM
gggaucuggggagagagacu

SEQ ID NO: 24563 - RNA, 20 nt, Artificial Sequence
  targeting sequence with TTCN PAM
cccaauccuagccccacugg

SEQ ID NO: 24564 - RNA, 20 nt, Artificial Sequence
  targeting sequence with TTCN PAM
uacuucccguggguaugucu

SEQ ID NO: 24565 - RNA, 20 nt, Artificial Sequence
  targeting sequence with TTCN PAM
cguggguaugucugcccuuc

SEQ ID NO: 24566 - RNA, 20 nt, Artificial Sequence
  targeting sequence with TTCN PAM
cuugaggucuauguugugcu

SEQ ID NO: 24567 - RNA, 20 nt, Artificial Sequence
  targeting sequence with TTCN PAM
ccaacagacuccaaccacac

SEQ ID NO: 24568 - RNA, 20 nt, Artificial Sequence
  targeting sequence with TTCN PAM
ggcuggcccagggguguggu

SEQ ID NO: 24569 - RNA, 20 nt, Artificial Sequence
  targeting sequence with TTCN PAM
cauuacagcuaucacuuaug

SEQ ID NO: 24570 - RNA, 20 nt, Artificial Sequence
  targeting sequence with TTCN PAM
uccaauuacugguacuauuc

SEQ ID NO: 24571 - RNA, 20 nt, Artificial Sequence
  targeting sequence with TTCN PAM
aauuacugguacuauucuua

SEQ ID NO: 24572 - RNA, 20 nt, Artificial Sequence
  targeting sequence with TTCN PAM
uaccagcugaggaaacugag

SEQ ID NO: 24573 - RNA, 20 nt, Artificial Sequence
  targeting sequence with TTCN PAM
ucagcugguaagaauaguac

SEQ ID NO: 24574 - RNA, 20 nt, Artificial Sequence
  targeting sequence with TTCN PAM
ccucucugagccucaguuuc

SEQ ID NO: 24575 - RNA, 20 nt, Artificial Sequence
  targeting sequence with TTCN PAM
uuggcuguguccccuaagcc

SEQ ID NO: 24576 - RNA, 20 nt, Artificial Sequence
  targeting sequence with TTCN PAM
cugggcuggaagggaugggc

SEQ ID NO: 24577 - RNA, 20 nt, Artificial Sequence
  targeting sequence with TTCN PAM
agcccagagaaaucaauggg

SEQ ID NO: 24578 - RNA, 20 nt, Artificial Sequence
  targeting sequence with TTCN PAM
ccaggaccuggagcucggag

SEQ ID NO: 24579 - RNA, 20 nt, Artificial Sequence
  targeting sequence with TTCN PAM
cauggauggugauccuggug

SEQ ID NO: 24580 - RNA, 20 nt, Artificial Sequence
  targeting sequence with TTCN PAM
ucccacagcugccccugguc

SEQ ID NO: 24581 - RNA, 20 nt, Artificial Sequence
  targeting sequence with TTCN PAM
ccuacgugguaagggggggc

SEQ ID NO: 24582 - RNA, 20 nt, Artificial Sequence
  targeting sequence with TTCN PAM
cggucaccacaccugagagu

SEQ ID NO: 24583 - RNA, 20 nt, Artificial Sequence
  targeting sequence with TTCN PAM
acgccaugccacacuuccaa

SEQ ID NO: 24584 - RNA, 20 nt, Artificial Sequence
  targeting sequence with TTCN PAM
aaugccuucuauguauaauu

SEQ ID NO: 24585 - RNA, 20 nt, Artificial Sequence
  targeting sequence with TTCN PAM
auguauaauuuaccccauca

SEQ ID NO: 24586 - RNA, 20 nt, Artificial Sequence
  targeting sequence with TTCN PAM
cacaguucugcaacuauaag

SEQ ID NO: 24587 - RNA, 20 nt, Artificial Sequence
  targeting sequence with TTCN PAM
gcaacuauaagacacggggg

SEQ ID NO: 24588 - RNA, 20 nt, Artificial Sequence
  targeting sequence with TTCN PAM
caugaucagagacccuuuug

SEQ ID NO: 24589 - RNA, 20 nt, Artificial Sequence
  targeting sequence with TTCN PAM
acacgccugaugcacggccu

SEQ ID NO: 24590 - RNA, 20 nt, Artificial Sequence
  targeting sequence with TTCN PAM
uuuugggaggccgugcauca

SEQ ID NO: 24591 - RNA, 20 nt, Artificial Sequence
  targeting sequence with TTCN PAM
gucucugcucacgcguauuu

SEQ ID NO: 24592 - RNA, 20 nt, Artificial Sequence
  targeting sequence with TTCN PAM
uacggccccucugggccagu

SEQ ID NO: 24593 - RNA, 20 nt, Artificial Sequence
  targeting sequence with TTCN PAM
ucagagcaaggcuuaggugg

SEQ ID NO: 24594 - RNA, 20 nt, Artificial Sequence
  targeting sequence with TTCN PAM
accuaagccuugcucugagg

SEQ ID NO: 24595 - RNA, 20 nt, Artificial Sequence
  targeting sequence with TTCN PAM
uccaccuaagccuugcucug

SEQ ID NO: 24596 - RNA, 20 nt, Artificial Sequence
  targeting sequence with TTCN PAM
cagaggagugggcaucagag

SEQ ID NO: 24597 - RNA, 20 nt, Artificial Sequence
  targeting sequence with TTCN PAM
gcuuggggcaucugcuuuau

SEQ ID NO: 24598 - RNA, 20 nt, Artificial Sequence
  targeting sequence with TTCN PAM
caccacacauccugccguuu

SEQ ID NO: 24599 - RNA, 20 nt, Artificial Sequence
  targeting sequence with TTCN PAM
gcacaggccuggaggccacg

SEQ ID NO: 24600 - RNA, 20 nt, Artificial Sequence
  targeting sequence with TTCN PAM
uggccuccaggccugugccg

SEQ ID NO: 24601 - RNA, 20 nt, Artificial Sequence
  targeting sequence with TTCN PAM
agaaagcagcagagugagga

SEQ ID NO: 24602 - RNA, 20 nt, Artificial Sequence
  targeting sequence with TTCN PAM
ggaagacuguugcuucgugg

SEQ ID NO: 24603 - RNA, 20 nt, Artificial Sequence
  targeting sequence with TTCN PAM
ccagcagugccagccucugc

SEQ ID NO: 24604 - RNA, 20 nt, Artificial Sequence
  targeting sequence with TTCN PAM
uuccucggauggucagcagg

SEQ ID NO: 24605 - RNA, 20 nt, Artificial Sequence
  targeting sequence with TTCN PAM
ucggauggucagcagggucc

SEQ ID NO: 24606 - RNA, 20 nt, Artificial Sequence
  targeting sequence with TTCN PAM
ccccucucucgggucaccug

SEQ ID NO: 24607 - RNA, 20 nt, Artificial Sequence
  targeting sequence with TTCN PAM
gcccacagucacaggcaccc

SEQ ID NO: 24608 - RNA, 20 nt, Artificial Sequence
  targeting sequence with TTCN PAM
ucuaagcagugggucugcac

SEQ ID NO: 24609 - RNA, 20 nt, Artificial Sequence
  targeting sequence with TTCN PAM
aggagcaauguuuggccaug

SEQ ID NO: 24610 - RNA, 20 nt, Artificial Sequence
  targeting sequence with TTCN PAM
ggggauaccaugaucacuaa

SEQ ID NO: 24611 - RNA, 20 nt, Artificial Sequence
  targeting sequence with TTCN PAM
gcccucggugucuccuccac

SEQ ID NO: 24612 - RNA, 20 nt, Artificial Sequence
  targeting sequence with TTCN PAM
cggcccaggcacugggaaca

SEQ ID NO: 24613 - RNA, 20 nt, Artificial Sequence
  targeting sequence with TTCN PAM
cagugccugggccgcgaaga

SEQ ID NO: 24614 - RNA, 20 nt, Artificial Sequence
  targeting sequence with TTCN PAM
uggacagcccugagcccaug

SEQ ID NO: 24615 - RNA, 20 nt, Artificial Sequence
  targeting sequence with TTCN PAM
cgcucagccuccaacuaaag

SEQ ID NO: 24616 - RNA, 20 nt, Artificial Sequence
  targeting sequence with TTCN PAM
gggucgugugcagcugcaaa

SEQ ID NO: 24617 - RNA, 20 nt, Artificial Sequence
  targeting sequence with TTCN PAM
gcccuuuugcagcugcacac

SEQ ID NO: 24618 - RNA, 20 nt, Artificial Sequence
  targeting sequence with TTCN PAM
cccacacagccucgaagauc

SEQ ID NO: 24619 - RNA, 20 nt, Artificial Sequence
  targeting sequence with TTCN PAM
aggcugugugggugaaugag

SEQ ID NO: 24620 - RNA, 20 nt, Artificial Sequence
  targeting sequence with TTCN PAM
cacagggugcagcccuggag

SEQ ID NO: 24621 - RNA, 20 nt, Artificial Sequence
  targeting sequence with TTCN PAM
ggauccagcuuaaaagcccc

SEQ ID NO: 24622 - RNA, 20 nt, Artificial Sequence
  targeting sequence with TTCN PAM
gaagccuucccagaugcugc

SEQ ID NO: 24623 - RNA, 20 nt, Artificial Sequence
  targeting sequence with TTCN PAM
gaacagggggcuuuuaagcu

SEQ ID NO: 24624 - RNA, 20 nt, Artificial Sequence
  targeting sequence with TTCN PAM
cagaugcugcccucaaauca

SEQ ID NO: 24625 - RNA, 20 nt, Artificial Sequence
  targeting sequence with TTCN PAM
caggagcagcaccaauacau

SEQ ID NO: 24626 - RNA, 20 nt, Artificial Sequence
  targeting sequence with TTCN PAM
uguuuaugucccuguggcug

SEQ ID NO: 24627 - RNA, 20 nt, Artificial Sequence
  targeting sequence with TTCN PAM
cgacacaucccagaugcccg

SEQ ID NO: 24628 - RNA, 20 nt, Artificial Sequence
  targeting sequence with TTCN PAM
auggaggagcugaggcccgu

SEQ ID NO: 24629 - RNA, 20 nt, Artificial Sequence
  targeting sequence with TTCN PAM
agggagguggggaggggggu

SEQ ID NO: 24630 - RNA, 20 nt, Artificial Sequence
  targeting sequence with TTCN PAM
cacccaggacgcgccuccag

SEQ ID NO: 24631 - RNA, 20 nt, Artificial Sequence
  targeting sequence with TTCN PAM
ggaccccuccuggaggcgcg

SEQ ID NO: 24632 - RNA, 20 nt, Artificial Sequence
  targeting sequence with TTCN PAM
acuuaccuggaaaaaggcag

SEQ ID NO: 24633 - RNA, 20 nt, Artificial Sequence
  targeting sequence with TTCN PAM
agguaaguagaagccaggcc

SEQ ID NO: 24634 - RNA, 20 nt, Artificial Sequence
  targeting sequence with TTCN PAM
gggagccacccguaggcacg

SEQ ID NO: 24635 - RNA, 20 nt, Artificial Sequence
  targeting sequence with TTCN PAM
ucugcagagcccucaggacu

SEQ ID NO: 24636 - RNA, 20 nt, Artificial Sequence
  targeting sequence with TTCN PAM
guuuccucugcagagcccuc

SEQ ID NO: 24637 - RNA, 20 nt, Artificial Sequence
  targeting sequence with TTCN PAM
gccucccagccucgucugag

SEQ ID NO: 24638 - RNA, 20 nt, Artificial Sequence
  targeting sequence with TTCN PAM
caauaguagaacaggggggc

SEQ ID NO: 24639 - RNA, 20 nt, Artificial Sequence
  targeting sequence with TTCN PAM
acuauugggaaaggugaggc

SEQ ID NO: 24640 - RNA, 20 nt, Artificial Sequence
  targeting sequence with TTCN PAM
cgccauguccaccuuaguga

SEQ ID NO: 24641 - RNA, 20 nt, Artificial Sequence
  targeting sequence with TTCN PAM
uuauucuacaccagaugaga

SEQ ID NO: 24642 - RNA, 20 nt, Artificial Sequence
  targeting sequence with TTCN PAM
acaccagaugagagcaggac

SEQ ID NO: 24643 - RNA, 20 nt, Artificial Sequence
  targeting sequence with TTCN PAM
ccucagggaccccagcccaa

SEQ ID NO: 24644 - RNA, 20 nt, Artificial Sequence
  targeting sequence with TTCN PAM
gugugccucaguuuccuauu

SEQ ID NO: 24645 - RNA, 20 nt, Artificial Sequence
  targeting sequence with TTCN PAM
acuguaggcaaacugcuuug

SEQ ID NO: 24646 - RNA, 20 nt, Artificial Sequence
  targeting sequence with TTCN PAM
uguguugcucauuccacugu

SEQ ID NO: 24647 - RNA, 20 nt, Artificial Sequence
  targeting sequence with TTCN PAM
gugggguuuacacacagcac

SEQ ID NO: 24648 - RNA, 20 nt, Artificial Sequence
  targeting sequence with TTCN PAM
augcccucggauuccguggg

SEQ ID NO: 24649 - RNA, 20 nt, Artificial Sequence
  targeting sequence with TTCN PAM
acucaggccucgaagccacu

SEQ ID NO: 24650 - RNA, 20 nt, Artificial Sequence
  targeting sequence with TTCN PAM
aggccugaguggaaacaugg

SEQ ID NO: 24651 - RNA, 20 nt, Artificial Sequence
  targeting sequence with TTCN PAM
cacagagaccacggcaccac

SEQ ID NO: 24652 - RNA, 20 nt, Artificial Sequence
  targeting sequence with TTCN PAM
uuaaaugccaaauuaaacau

SEQ ID NO: 24653 - RNA, 20 nt, Artificial Sequence
  targeting sequence with TTCN PAM
gagccuccugcacgcccggg

SEQ ID NO: 24654 - RNA, 20 nt, Artificial Sequence
  targeting sequence with TTCN PAM
gcuaguuacuguaauucuca

SEQ ID NO: 24655 - RNA, 20 nt, Artificial Sequence
  targeting sequence with TTCN PAM
cagacaggcuuccucugugc

SEQ ID NO: 24656 - RNA, 20 nt, Artificial Sequence
  targeting sequence with TTCN PAM
ucugugccuccaccccagcu

SEQ ID NO: 24657 - RNA, 20 nt, Artificial Sequence
  targeting sequence with TTCN PAM
ccaucuauaaaaugggaccu

SEQ ID NO: 24658 - RNA, 20 nt, Artificial Sequence
  targeting sequence with TTCN PAM
guagcuucccuaagaucaua

SEQ ID NO: 24659 - RNA, 20 nt, Artificial Sequence
  targeting sequence with TTCN PAM
cuaagaucauacagccacag

SEQ ID NO: 24660 - RNA, 20 nt, Artificial Sequence
  targeting sequence with TTCN PAM
ugagaagauucucugagcuc

SEQ ID NO: 24661 - RNA, 20 nt, Artificial Sequence
  targeting sequence with TTCN PAM
caggaaucccugaagcccug

SEQ ID NO: 24662 - RNA, 20 nt, Artificial Sequence
  targeting sequence with TTCN PAM
cugagcucagugcaaaaagg

SEQ ID NO: 24663 - RNA, 20 nt, Artificial Sequence
  targeting sequence with TTCN PAM
ccgggaugugugcccagaaa

SEQ ID NO: 24664 - RNA, 20 nt, Artificial Sequence
  targeting sequence with TTCN PAM
uuaccuuuuuuaaaaaauuc

SEQ ID NO: 24665 - RNA, 20 nt, Artificial Sequence
  targeting sequence with TTCN PAM
aaccagucucggugcgaggc

SEQ ID NO: 24666 - RNA, 20 nt, Artificial Sequence
  targeting sequence with TTCN PAM
ggugcagccagcagcacucc

SEQ ID NO: 24667 - RNA, 20 nt, Artificial Sequence
  targeting sequence with TTCN PAM
agcuguaccagcugccuguc

SEQ ID NO: 24668 - RNA, 20 nt, Artificial Sequence
  targeting sequence with TTCN PAM
ccaccccucaacucaucccu

SEQ ID NO: 24669 - RNA, 20 nt, Artificial Sequence
  targeting sequence with TTCN PAM
caggcagccccgaugaugag

SEQ ID NO: 24670 - RNA, 20 nt, Artificial Sequence
  targeting sequence with TTCN PAM
ccaucuacgacugcagccgc

SEQ ID NO: 24671 - RNA, 20 nt, Artificial Sequence
  targeting sequence with TTCN PAM
gcccauugacccucacagac

SEQ ID NO: 24672 - RNA, 20 nt, Artificial Sequence
  targeting sequence with TTCN PAM
agaccacgugacuguugaga

SEQ ID NO: 24673 - RNA, 20 nt, Artificial Sequence
  targeting sequence with TTCN PAM
cccccaaccaggguaagcac

SEQ ID NO: 24674 - RNA, 20 nt, Artificial Sequence
  targeting sequence with TTCN PAM
gcccuucccccccaaccagg

SEQ ID NO: 24675 - RNA, 20 nt, Artificial Sequence
  targeting sequence with TTCN PAM
cauagucacaggccaucucc

SEQ ID NO: 24676 - RNA, 20 nt, Artificial Sequence
  targeting sequence with TTCN PAM
gagaucgaugugcgccagga

SEQ ID NO: 24677 - RNA, 20 nt, Artificial Sequence
  targeting sequence with TTCN PAM
ggaccagugccagcgagggc

SEQ ID NO: 24678 - RNA, 20 nt, Artificial Sequence
  targeting sequence with TTCN PAM
agccagcagcauuucuggac

SEQ ID NO: 24679 - RNA, 20 nt, Artificial Sequence
  targeting sequence with TTCN PAM
cccuggccaucugggggcag

SEQ ID NO: 24680 - RNA, 20 nt, Artificial Sequence
  targeting sequence with TTCN PAM
gguugaucuguggggguagu

SEQ ID NO: 24681 - RNA, 20 nt, Artificial Sequence
  targeting sequence with TTCN PAM
ggaggggugggaagucacgg

SEQ ID NO: 24682 - RNA, 20 nt, Artificial Sequence
  targeting sequence with TTCN PAM
caccccuccugaagggucca

SEQ ID NO: 24683 - RNA, 20 nt, Artificial Sequence
  targeting sequence with TTCN PAM
gccucugcugugcccccacc

SEQ ID NO: 24684 - RNA, 20 nt, Artificial Sequence
  targeting sequence with TTCN PAM
gggcucgucuccaaggcauc

SEQ ID NO: 24685 - RNA, 20 nt, Artificial Sequence
  targeting sequence with TTCN PAM
cagggcgggaugccuuggag

SEQ ID NO: 24686 - RNA, 20 nt, Artificial Sequence
  targeting sequence with TTCN PAM
uaaacuacaaagccugcaca

SEQ ID NO: 24687 - RNA, 20 nt, Artificial Sequence
  targeting sequence with TTCN PAM
ggcuuugacacugaggagcu

SEQ ID NO: 24688 - RNA, 20 nt, Artificial Sequence
  targeting sequence with TTCN PAM
ugagcuaauggggcaggcgg

SEQ ID NO: 24689 - RNA, 20 nt, Artificial Sequence
  targeting sequence with TTCN PAM
ccgggccugaccccaucagc

SEQ ID NO: 24690 - RNA, 20 nt, Artificial Sequence
  targeting sequence with TTCN PAM
uccccccgacgcccauuuca

SEQ ID NO: 24691 - RNA, 20 nt, Artificial Sequence
  targeting sequence with TTCN PAM
ccgaagaggaaucugaggcu

SEQ ID NO: 24692 - RNA, 20 nt, Artificial Sequence
  targeting sequence with TTCN PAM
gugaaaugggcgucgggggg

SEQ ID NO: 24693 - RNA, 20 nt, Artificial Sequence
  targeting sequence with TTCN PAM
ucuucggugaaaugggcguc

SEQ ID NO: 24694 - RNA, 20 nt, Artificial Sequence
  targeting sequence with TTCN PAM
cuuugugccucuugccaacu

SEQ ID NO: 24695 - RNA, 20 nt, Artificial Sequence
  targeting sequence with TTCN PAM
acaccccuagccuuaagccu

SEQ ID NO: 24696 - RNA, 20 nt, Artificial Sequence
  targeting sequence with TTCN PAM
uccucccugcaccuugguuc

SEQ ID NO: 24697 - RNA, 20 nt, Artificial Sequence
  targeting sequence with TTCN PAM
aggccccagauaauccuggu

SEQ ID NO: 24698 - RNA, 20 nt, Artificial Sequence
  targeting sequence with TTCN PAM
cuggcucugagggacccucu

SEQ ID NO: 24699 - RNA, 20 nt, Artificial Sequence
  targeting sequence with TTCN PAM
caguguguugucuugucugg

SEQ ID NO: 24700 - RNA, 20 nt, Artificial Sequence
  targeting sequence with TTCN PAM
gccccagccuuccuccuggg

SEQ ID NO: 24701 - RNA, 20 nt, Artificial Sequence
  targeting sequence with TTCN PAM
uccuggggcucccaaacccu

SEQ ID NO: 24702 - RNA, 20 nt, Artificial Sequence
  targeting sequence with TTCN PAM
uggcucccuucugcuuaugg

SEQ ID NO: 24703 - RNA, 20 nt, Artificial Sequence
  targeting sequence with TTCN PAM
gcuuauggaaugaaccuguu

SEQ ID NO: 24704 - RNA, 20 nt, Artificial Sequence
  targeting sequence with TTCN PAM
auaagcagaagggagccaug

SEQ ID NO: 24705 - RNA, 20 nt, Artificial Sequence
  targeting sequence with TTCN PAM
uuccauaagcagaagggagc

SEQ ID NO: 24706 - RNA, 20 nt, Artificial Sequence
  targeting sequence with TTCN PAM
ggcacucaagguccugguga

SEQ ID NO: 24707 - RNA, 20 nt, Artificial Sequence
  targeting sequence with TTCN PAM
agccuccaggcauuugccua

SEQ ID NO: 24708 - RNA, 20 nt, Artificial Sequence
  targeting sequence with TTCN PAM
agaggagagcacagcauagg

SEQ ID NO: 24709 - RNA, 20 nt, Artificial Sequence
  targeting sequence with TTCN PAM
uuccuguuccccuucuacca

SEQ ID NO: 24710 - RNA, 20 nt, Artificial Sequence
  targeting sequence with TTCN PAM
uguuccccuucuaccaaugc

SEQ ID NO: 24711 - RNA, 20 nt, Artificial Sequence
  targeting sequence with TTCN PAM
ccuucuaccaaugcacacau

SEQ ID NO: 24712 - RNA, 20 nt, Artificial Sequence
  targeting sequence with TTCN PAM
accaaugcacacaugaggcc

SEQ ID NO: 24713 - RNA, 20 nt, Artificial Sequence
  targeting sequence with TTCN PAM
gggccucaugugugcauugg

SEQ ID NO: 24714 - RNA, 20 nt, Artificial Sequence
  targeting sequence with TTCN PAM
ccccaggcuuccaugggcuu

SEQ ID NO: 24715 - RNA, 20 nt, Artificial Sequence
  targeting sequence with TTCN PAM
augggcuuugucccagccug

SEQ ID NO: 24716 - RNA, 20 nt, Artificial Sequence
  targeting sequence with TTCN PAM
acuccuucaaucauuuauug

SEQ ID NO: 24717 - RNA, 20 nt, Artificial Sequence
  targeting sequence with TTCN PAM
aucauuuauugagcaacuac

SEQ ID NO: 24718 - RNA, 20 nt, Artificial Sequence
  targeting sequence with TTCN PAM
ccucucagagccucaacguu

SEQ ID NO: 24719 - RNA, 20 nt, Artificial Sequence
  targeting sequence with TTCN PAM
caucuguggcaugagaaucg

SEQ ID NO: 24720 - RNA, 20 nt, Artificial Sequence
  targeting sequence with TTCN PAM
caugccacagaugagaacgu

SEQ ID NO: 24721 - RNA, 20 nt, Artificial Sequence
  targeting sequence with TTCN PAM
cacaccccugcaagggaggc

SEQ ID NO: 24722 - RNA, 20 nt, Artificial Sequence
  targeting sequence with TTCN PAM
ugcaccaggcccggccuaac

SEQ ID NO: 24723 - RNA, 20 nt, Artificial Sequence
  targeting sequence with TTCN PAM
cugcucuggggcaggacaga

SEQ ID NO: 24724 - RNA, 20 nt, Artificial Sequence
  targeting sequence with TTCN PAM
gcgcaucuccucccagcucc

SEQ ID NO: 24725 - RNA, 20 nt, Artificial Sequence
  targeting sequence with TTCN PAM
cugucaagggcuguaagcug

SEQ ID NO: 24726 - RNA, 20 nt, Artificial Sequence
  targeting sequence with TTCN PAM
cucuccaggccucaguuucc

SEQ ID NO: 24727 - RNA, 20 nt, Artificial Sequence
  targeting sequence with TTCN PAM
ccuagcacuuuacaguuuac

SEQ ID NO: 24728 - RNA, 20 nt, Artificial Sequence
  targeting sequence with TTCN PAM
cccauucgccuagcacuuua

SEQ ID NO: 24729 - RNA, 20 nt, Artificial Sequence
  targeting sequence with TTCN PAM
caagguagguaugguugggg

SEQ ID NO: 24730 - RNA, 20 nt, Artificial Sequence
  targeting sequence with TTCN PAM
ugggcacggucaacgggagg

SEQ ID NO: 24731 - RNA, 20 nt, Artificial Sequence
  targeting sequence with TTCN PAM
gcgccccgggccucaccucc

SEQ ID NO: 24732 - RNA, 20 nt, Artificial Sequence
  targeting sequence with TTCN PAM
ggggcugcaggauggacagc

SEQ ID NO: 24733 - RNA, 20 nt, Artificial Sequence
  targeting sequence with TTCN PAM
agcuccagccagagcagcug

SEQ ID NO: 24734 - RNA, 20 nt, Artificial Sequence
  targeting sequence with TTCN PAM
ucuuccagcuccagccagag

SEQ ID NO: 24735 - RNA, 20 nt, Artificial Sequence
  targeting sequence with TTCN PAM
ggagcugggaucugacgugc

SEQ ID NO: 24736 - RNA, 20 nt, Artificial Sequence
  targeting sequence with TTCN PAM
ccggcuccccgcccgcacag

SEQ ID NO: 24737 - RNA, 20 nt, Artificial Sequence
  targeting sequence with TTCN PAM
agucuuguuccuacuuuaua

SEQ ID NO: 24738 - RNA, 20 nt, Artificial Sequence
  targeting sequence with TTCN PAM
uacuuuauauccucagugcu

SEQ ID NO: 24739 - RNA, 20 nt, Artificial Sequence
  targeting sequence with TTCN PAM
aaggagaugauguucaaggu

SEQ ID NO: 24740 - RNA, 20 nt, Artificial Sequence
  targeting sequence with TTCN PAM
agguacacgggaaccagcag

SEQ ID NO: 24741 - RNA, 20 nt, Artificial Sequence
  targeting sequence with TTCN PAM
cguguaccuugaacaucauc

SEQ ID NO: 24742 - RNA, 20 nt, Artificial Sequence
  targeting sequence with TTCN PAM
cucgccugcugguucccgug

SEQ ID NO: 24743 - RNA, 20 nt, Artificial Sequence
  targeting sequence with TTCN PAM
cagcugugcccagccaggag

SEQ ID NO: 24744 - RNA, 20 nt, Artificial Sequence
  targeting sequence with TTCN PAM
uacagccccggcuggcucug

SEQ ID NO: 24745 - RNA, 20 nt, Artificial Sequence
  targeting sequence with TTCN PAM
uccugccgggugucugcucu

SEQ ID NO: 24746 - RNA, 20 nt, Artificial Sequence
  targeting sequence with TTCN PAM
uucccuccccaagcaccuau

SEQ ID NO: 24747 - RNA, 20 nt, Artificial Sequence
  targeting sequence with TTCN PAM
cuccccaagcaccuaucccc

SEQ ID NO: 24748 - RNA, 20 nt, Artificial Sequence
  targeting sequence with TTCN PAM
gacacacccagccuguuugu

SEQ ID NO: 24749 - RNA, 20 nt, Artificial Sequence
  targeting sequence with TTCN PAM
cugaacuugcuccuaccuuc

SEQ ID NO: 24750 - RNA, 20 nt, Artificial Sequence
  targeting sequence with TTCN PAM
gggaacagcccggacauggg

SEQ ID NO: 24751 - RNA, 20 nt, Artificial Sequence
  targeting sequence with TTCN PAM
cucccuucuccugggucuug

SEQ ID NO: 24752 - RNA, 20 nt, Artificial Sequence
  targeting sequence with TTCN PAM
ccugggucuugguauguuca

SEQ ID NO: 24753 - RNA, 20 nt, Artificial Sequence
  targeting sequence with TTCN PAM
aagguuccuggugcaauuug

SEQ ID NO: 24754 - RNA, 20 nt, Artificial Sequence
  targeting sequence with TTCN PAM
uggugcaauuugcacaaaaa

SEQ ID NO: 24755 - RNA, 20 nt, Artificial Sequence
  targeting sequence with TTCN PAM
auuuuugugcaaauugcacc

SEQ ID NO: 24756 - RNA, 20 nt, Artificial Sequence
  targeting sequence with TTCN PAM
uggaggccuguuuucuauuu

SEQ ID NO: 24757 - RNA, 20 nt, Artificial Sequence
  targeting sequence with TTCN PAM
cuccucugcaccacccuugu

SEQ ID NO: 24758 - RNA, 20 nt, Artificial Sequence
  targeting sequence with TTCN PAM
uguaaucagugugggcuuau

SEQ ID NO: 24759 - RNA, 20 nt, Artificial Sequence
  targeting sequence with TTCN PAM
caguaaauguggccuguuau

SEQ ID NO: 24760 - RNA, 20 nt, Artificial Sequence
  targeting sequence with TTCN PAM
gggagucagugcacuggccu

SEQ ID NO: 24761 - RNA, 20 nt, Artificial Sequence
  targeting sequence with TTCN PAM
ccaucugugagauaggaccc

SEQ ID NO: 24762 - RNA, 20 nt, Artificial Sequence
  targeting sequence with TTCN PAM
ccucugagccucaguuuccc

SEQ ID NO: 24763 - RNA, 20 nt, Artificial Sequence
  targeting sequence with TTCN PAM
ggugaccucccugaguccug

SEQ ID NO: 24764 - RNA, 20 nt, Artificial Sequence
  targeting sequence with TTCN PAM
aaugcugccuuccggugacc

SEQ ID NO: 24765 - RNA, 20 nt, Artificial Sequence
  targeting sequence with TTCN PAM
ccucugagccucauuuuacu

SEQ ID NO: 24766 - RNA, 20 nt, Artificial Sequence
  targeting sequence with TTCN PAM
gcauagaggcugggaugaau

SEQ ID NO: 24767 - RNA, 20 nt, Artificial Sequence
  targeting sequence with TTCN PAM
ucccagccucuaugcggaaa

SEQ ID NO: 24768 - RNA, 20 nt, Artificial Sequence
  targeting sequence with TTCN PAM
caaacgccgggcgugguggc

SEQ ID NO: 24769 - RNA, 20 nt, Artificial Sequence
  targeting sequence with TTCN PAM
cagcuacuugggaggcugag

SEQ ID NO: 24770 - RNA, 20 nt, Artificial Sequence
  targeting sequence with TTCN PAM
aggcuguagugugcuaugcu

SEQ ID NO: 24771 - RNA, 20 nt, Artificial Sequence
  targeting sequence with TTCN PAM
gcaucaauauggugaccucc

SEQ ID NO: 24772 - RNA, 20 nt, Artificial Sequence
  targeting sequence with TTCN PAM
ccccuccuuaggcaaccugg

SEQ ID NO: 24773 - RNA, 20 nt, Artificial Sequence
  targeting sequence with TTCN PAM
gaccugggccaguucacccc

SEQ ID NO: 24774 - RNA, 20 nt, Artificial Sequence
  targeting sequence with TTCN PAM
uacaguaccuggcccacagu

SEQ ID NO: 24775 - RNA, 20 nt, Artificial Sequence
  targeting sequence with TTCN PAM
uggacacuuacugugggcca

SEQ ID NO: 24776 - RNA, 20 nt, Artificial Sequence
  targeting sequence with TTCN PAM
gacaugacugcugcuuaugu

SEQ ID NO: 24777 - RNA, 20 nt, Artificial Sequence
  targeting sequence with TTCN PAM
uaauaauaacauaagcagca

SEQ ID NO: 24778 - RNA, 20 nt, Artificial Sequence
  targeting sequence with TTCN PAM
acugcugaucaaaaaagaaa

SEQ ID NO: 24779 - RNA, 20 nt, Artificial Sequence
  targeting sequence with TTCN PAM
uuuuugaucagcaguugaac

SEQ ID NO: 24780 - RNA, 20 nt, Artificial Sequence
  targeting sequence with TTCN PAM
uucuuuuuugaucagcaguu

SEQ ID NO: 24781 - RNA, 20 nt, Artificial Sequence
  targeting sequence with TTCN PAM
uucuuucuuuuuugaucagc

SEQ ID NO: 24782 - RNA, 20 nt, Artificial Sequence
  targeting sequence with TTCN PAM
gggcaaaucaugccuaccuu

SEQ ID NO: 24783 - RNA, 20 nt, Artificial Sequence
  targeting sequence with TTCN PAM
uuuuccaagaccacucuugc

SEQ ID NO: 24784 - RNA, 20 nt, Artificial Sequence
  targeting sequence with TTCN PAM
aagaccacucuugcccccua

SEQ ID NO: 24785 - RNA, 20 nt, Artificial Sequence
  targeting sequence with TTCN PAM
uaucugcuaacacagcugcc

SEQ ID NO: 24786 - RNA, 20 nt, Artificial Sequence
  targeting sequence with TTCN PAM
agcccucccaugguuuccag

SEQ ID NO: 24787 - RNA, 20 nt, Artificial Sequence
  targeting sequence with TTCN PAM
aggacacucagaauaaaucc

SEQ ID NO: 24788 - RNA, 20 nt, Artificial Sequence
  targeting sequence with TTCN PAM
gaguguccuggaaaccaugg

SEQ ID NO: 24789 - RNA, 20 nt, Artificial Sequence
  targeting sequence with TTCN PAM
ggauuuauucugaguguccu

SEQ ID NO: 24790 - RNA, 20 nt, Artificial Sequence
  targeting sequence with TTCN PAM
aacuccauuucacaccuccc

SEQ ID NO: 24791 - RNA, 20 nt, Artificial Sequence
  targeting sequence with TTCN PAM
caccucccuugcccuugcuc

SEQ ID NO: 24792 - RNA, 20 nt, Artificial Sequence
  targeting sequence with TTCN PAM
ccccagccacacuggccuca

SEQ ID NO: 24793 - RNA, 20 nt, Artificial Sequence
  targeting sequence with TTCN PAM
gugccucaaauaucacaagc

SEQ ID NO: 24794 - RNA, 20 nt, Artificial Sequence
  targeting sequence with TTCN PAM
ugccucaggaccucuggccu

SEQ ID NO: 24795 - RNA, 20 nt, Artificial Sequence
  targeting sequence with TTCN PAM
ugggcagagggagcggccag

SEQ ID NO: 24796 - RNA, 20 nt, Artificial Sequence
  targeting sequence with TTCN PAM
cccccacccgagagcugcau

SEQ ID NO: 24797 - RNA, 20 nt, Artificial Sequence
  targeting sequence with TTCN PAM
agggcuguccccaacuguaa

SEQ ID NO: 24798 - RNA, 20 nt, Artificial Sequence
  targeting sequence with TTCN PAM
cugcagcugcaggauugcug

SEQ ID NO: 24799 - RNA, 20 nt, Artificial Sequence
  targeting sequence with TTCN PAM
uaggggcuagguaacuaagu

SEQ ID NO: 24800 - RNA, 20 nt, Artificial Sequence
  targeting sequence with TTCN PAM
cugaauaugaauuacuugca

SEQ ID NO: 24801 - RNA, 20 nt, Artificial Sequence
  targeting sequence with TTCN PAM
gugaaaaaaguuacuuaguu

SEQ ID NO: 24802 - RNA, 20 nt, Artificial Sequence
  targeting sequence with TTCN PAM
uauucagugaaaaaaguuac

SEQ ID NO: 24803 - RNA, 20 nt, Artificial Sequence
  targeting sequence with TTCN PAM
caauuuuaauuuuaaacaac

SEQ ID NO: 24804 - RNA, 20 nt, Artificial Sequence
  targeting sequence with TTCN PAM
cuuggugggagggauucaca

SEQ ID NO: 24805 - RNA, 20 nt, Artificial Sequence
  targeting sequence with TTCN PAM
ggaaggggacaccugggagg

SEQ ID NO: 24806 - RNA, 20 nt, Artificial Sequence
  targeting sequence with TTCN PAM
agaacuuauguucccuuggu

SEQ ID NO: 24807 - RNA, 20 nt, Artificial Sequence
  targeting sequence with TTCN PAM
caggaccccacccuggcugg

SEQ ID NO: 24808 - RNA, 20 nt, Artificial Sequence
  targeting sequence with TTCN PAM
caagccauuaauucugcacc

SEQ ID NO: 24809 - RNA, 20 nt, Artificial Sequence
  targeting sequence with TTCN PAM
gcaccgaaggaauuuucuaa

SEQ ID NO: 24810 - RNA, 20 nt, Artificial Sequence
  targeting sequence with TTCN PAM
gugcagaauuaauggcuugu

SEQ ID NO: 24811 - RNA, 20 nt, Artificial Sequence
  targeting sequence with TTCN PAM
uucggugcagaauuaauggc

SEQ ID NO: 24812 - RNA, 20 nt, Artificial Sequence
  targeting sequence with TTCN PAM
aaaaggccuuucccccagcg

SEQ ID NO: 24813 - RNA, 20 nt, Artificial Sequence
  targeting sequence with TTCN PAM
cccagcguuuuuuccccuua

SEQ ID NO: 24814 - RNA, 20 nt, Artificial Sequence
  targeting sequence with TTCN PAM
ccuuauccuaaaauaaaauu

SEQ ID NO: 24815 - RNA, 20 nt, Artificial Sequence
  targeting sequence with TTCN PAM
uuaaaaaaauuuuuuaaaau

SEQ ID NO: 24816 - RNA, 20 nt, Artificial Sequence
  targeting sequence with TTCN PAM
gagcagccgacggcuuacuu

SEQ ID NO: 24817 - RNA, 20 nt, Artificial Sequence
  targeting sequence with TTCN PAM
gagggggaagcugauucccc

SEQ ID NO: 24818 - RNA, 20 nt, Artificial Sequence
  targeting sequence with TTCN PAM
cccucggaacacagaucauu

SEQ ID NO: 24819 - RNA, 20 nt, Artificial Sequence
  targeting sequence with TTCN PAM
ccagcugccaggggaaauca

SEQ ID NO: 24820 - RNA, 20 nt, Artificial Sequence
  targeting sequence with TTCN PAM
ccuggcagcuggggaaucag

SEQ ID NO: 24821 - RNA, 20 nt, Artificial Sequence
  targeting sequence with TTCN PAM
guguuugagccgguuugccu

SEQ ID NO: 24822 - RNA, 20 nt, Artificial Sequence
  targeting sequence with TTCN PAM
cgccacgcugggcuuccgug

SEQ ID NO: 24823 - RNA, 20 nt, Artificial Sequence
  targeting sequence with TTCN PAM
gccgaggccagcaugcucag

SEQ ID NO: 24824 - RNA, 20 nt, Artificial Sequence
  targeting sequence with TTCN PAM
aaacucaaguucuccugaga

SEQ ID NO: 24825 - RNA, 20 nt, Artificial Sequence
  targeting sequence with TTCN PAM
ccugagagcagggaaggcuc

SEQ ID NO: 24826 - RNA, 20 nt, Artificial Sequence
  targeting sequence with TTCN PAM
cugcucucaggagaacuuga

SEQ ID NO: 24827 - RNA, 20 nt, Artificial Sequence
  targeting sequence with TTCN PAM
cucacacaaagcuggucaga

SEQ ID NO: 24828 - RNA, 20 nt, Artificial Sequence
  targeting sequence with TTCN PAM
aggccuucgugccccagcuc

SEQ ID NO: 24829 - RNA, 20 nt, Artificial Sequence
  targeting sequence with TTCN PAM
ugccccagcuccugccagcu

SEQ ID NO: 24830 - RNA, 20 nt, Artificial Sequence
  targeting sequence with TTCN PAM
aggaccuguggagacugaug

SEQ ID NO: 24831 - RNA, 20 nt, Artificial Sequence
  targeting sequence with TTCN PAM
gcagccaaugcccaucccau

SEQ ID NO: 24832 - RNA, 20 nt, Artificial Sequence
  targeting sequence with TTCN PAM
uacuccccuuggcacuucag

SEQ ID NO: 24833 - RNA, 20 nt, Artificial Sequence
  targeting sequence with TTCN PAM
gcgcccccggugucuggacc

SEQ ID NO: 24834 - RNA, 20 nt, Artificial Sequence
  targeting sequence with TTCN PAM
cucuccaggcaugcccagac

SEQ ID NO: 24835 - RNA, 20 nt, Artificial Sequence
  targeting sequence with TTCN PAM
agauguggcucagcccccca

SEQ ID NO: 24836 - RNA, 20 nt, Artificial Sequence
  targeting sequence with TTCN PAM
cauggcagcacaugcaugac

SEQ ID NO: 24837 - RNA, 20 nt, Artificial Sequence
  targeting sequence with TTCN PAM
ccagcauggagccugugcuc

SEQ ID NO: 24838 - RNA, 20 nt, Artificial Sequence
  targeting sequence with TTCN PAM
cuccagagcacaggcuccau

SEQ ID NO: 24839 - RNA, 20 nt, Artificial Sequence
  targeting sequence with TTCN PAM
uuuguaaacauucccuccag

SEQ ID NO: 24840 - RNA, 20 nt, Artificial Sequence
  targeting sequence with TTCN PAM
uuucuuuuguaaacauuccc

SEQ ID NO: 24841 - RNA, 20 nt, Artificial Sequence
  targeting sequence with TTCN PAM
cacuuuagucaaaauuaggu

SEQ ID NO: 24842 - RNA, 20 nt, Artificial Sequence
  targeting sequence with TTCN PAM
cucuaagucgagugacugag

SEQ ID NO: 24843 - RNA, 20 nt, Artificial Sequence
  targeting sequence with TTCN PAM
ccagcacccagcauggccgu

SEQ ID NO: 24844 - RNA, 20 nt, Artificial Sequence
  targeting sequence with TTCN PAM
cucaguucuccagcacccag

SEQ ID NO: 24845 - RNA, 20 nt, Artificial Sequence
  targeting sequence with TTCN PAM
ggcccaggcaacacuggcug

SEQ ID NO: 24846 - RNA, 20 nt, Artificial Sequence
  targeting sequence with TTCN PAM
guuccuguaaaaaccucacu

SEQ ID NO: 24847 - RNA, 20 nt, Artificial Sequence
  targeting sequence with TTCN PAM
uguaaaaaccucacuuuauc

SEQ ID NO: 24848 - RNA, 20 nt, Artificial Sequence
  targeting sequence with TTCN PAM
gccccguuuugagagcagga

SEQ ID NO: 24849 - RNA, 20 nt, Artificial Sequence
  targeting sequence with TTCN PAM
cuccccaggaagccaguugg

SEQ ID NO: 24850 - RNA, 20 nt, Artificial Sequence
  targeting sequence with TTCN PAM
uggggagagaaagucaacac

SEQ ID NO: 24851 - RNA, 20 nt, Artificial Sequence
  targeting sequence with TTCN PAM
aacuggcuuccuggggagag

SEQ ID NO: 24852 - RNA, 20 nt, Artificial Sequence
  targeting sequence with TTCN PAM
agagcccggcuucucaggcc

SEQ ID NO: 24853 - RNA, 20 nt, Artificial Sequence
  targeting sequence with TTCN PAM
caggccucacauccugccgc

SEQ ID NO: 24854 - RNA, 20 nt, Artificial Sequence
  targeting sequence with TTCN PAM
uagugccaccugcggugggu

SEQ ID NO: 24855 - RNA, 20 nt, Artificial Sequence
  targeting sequence with TTCN PAM
gucacagguacagacugcau

SEQ ID NO: 24856 - RNA, 20 nt, Artificial Sequence
  targeting sequence with TTCN PAM
caagugcaaagccuccgcag

SEQ ID NO: 24857 - RNA, 20 nt, Artificial Sequence
  targeting sequence with TTCN PAM
ugccugaaguguuugauugu

SEQ ID NO: 24858 - RNA, 20 nt, Artificial Sequence
  targeting sequence with TTCN PAM
ggcaggaaggugcccucacu

SEQ ID NO: 24859 - RNA, 20 nt, Artificial Sequence
  targeting sequence with TTCN PAM
caggaucauaaacaaucaaa

SEQ ID NO: 24860 - RNA, 20 nt, Artificial Sequence
  targeting sequence with TTCN PAM
uugccacagagcugaaauuu

SEQ ID NO: 24861 - RNA, 20 nt, Artificial Sequence
  targeting sequence with TTCN PAM
gcucuguggcaaggaaaccu

SEQ ID NO: 24862 - RNA, 20 nt, Artificial Sequence
  targeting sequence with TTCN PAM
gcucuguggcaaauuucagc

SEQ ID NO: 24863 - RNA, 20 nt, Artificial Sequence
  targeting sequence with TTCN PAM
caccauggcucacgccugua

SEQ ID NO: 24864 - RNA, 20 nt, Artificial Sequence
  targeting sequence with TTCN PAM
acguccaccucccaaagcgc

SEQ ID NO: 24865 - RNA, 20 nt, Artificial Sequence
  targeting sequence with TTCN PAM
ggcgauccuuccacguccac

SEQ ID NO: 24866 - RNA, 20 nt, Artificial Sequence
  targeting sequence with TTCN PAM
ccaccgcacuccagucuggg

SEQ ID NO: 24867 - RNA, 20 nt, Artificial Sequence
  targeting sequence with TTCN PAM
agacagggucucugucaccc

SEQ ID NO: 24868 - RNA, 20 nt, Artificial Sequence
  targeting sequence with TTCN PAM
cauucauccuucacgggagc

SEQ ID NO: 24869 - RNA, 20 nt, Artificial Sequence
  targeting sequence with TTCN PAM
uccuucacgggagccaaaga

SEQ ID NO: 24870 - RNA, 20 nt, Artificial Sequence
  targeting sequence with TTCN PAM
cgggagccaaagagagcuuu

SEQ ID NO: 24871 - RNA, 20 nt, Artificial Sequence
  targeting sequence with TTCN PAM
aggagcccauguugcauuaa

SEQ ID NO: 24872 - RNA, 20 nt, Artificial Sequence
  targeting sequence with TTCN PAM
uuuccaggagcccauguugc

SEQ ID NO: 24873 - RNA, 20 nt, Artificial Sequence
  targeting sequence with TTCN PAM
uuacucccaacuaaacucca

SEQ ID NO: 24874 - RNA, 20 nt, Artificial Sequence
  targeting sequence with TTCN PAM
uaguuuugacaaauguacca

SEQ ID NO: 24875 - RNA, 20 nt, Artificial Sequence
  targeting sequence with TTCN PAM
cccauugcuaacaucuuacc

SEQ ID NO: 24876 - RNA, 20 nt, Artificial Sequence
  targeting sequence with TTCN PAM
uguauacccguccccuaguu

SEQ ID NO: 24877 - RNA, 20 nt, Artificial Sequence
  targeting sequence with TTCN PAM
ugaaaaucuaaaauuauucc

SEQ ID NO: 24878 - RNA, 20 nt, Artificial Sequence
  targeting sequence with TTCN PAM
ggaaaguuacaaagauagua

SEQ ID NO: 24879 - RNA, 20 nt, Artificial Sequence
  targeting sequence with TTCN PAM
aaaguaaaaaguuuauuuug

SEQ ID NO: 24880 - RNA, 20 nt, Artificial Sequence
  targeting sequence with TTCN PAM
caugguucccuagugcuguc

SEQ ID NO: 24881 - RNA, 20 nt, Artificial Sequence
  targeting sequence with TTCN PAM
cuagugcugucaacacaaac

SEQ ID NO: 24882 - RNA, 20 nt, Artificial Sequence
  targeting sequence with TTCN PAM
agggcccaggagcaaaguuu

SEQ ID NO: 24883 - RNA, 20 nt, Artificial Sequence
  targeting sequence with TTCN PAM
uacccuggccuggcugugug

SEQ ID NO: 24884 - RNA, 20 nt, Artificial Sequence
  targeting sequence with TTCN PAM
acuucagcaugcacugccuc

SEQ ID NO: 24885 - RNA, 20 nt, Artificial Sequence
  targeting sequence with TTCN PAM
gcaugcacugccucucagaa

SEQ ID NO: 24886 - RNA, 20 nt, Artificial Sequence
  targeting sequence with TTCN PAM
gagaggcagugcaugcugaa

SEQ ID NO: 24887 - RNA, 20 nt, Artificial Sequence
  targeting sequence with TTCN PAM
uugccucaguuuacucucag

SEQ ID NO: 24888 - RNA, 20 nt, Artificial Sequence
  targeting sequence with TTCN PAM
cagcagcagguggucuccuc

SEQ ID NO: 24889 - RNA, 20 nt, Artificial Sequence
  targeting sequence with TTCN PAM
ggggugaccaagaggcuucc

SEQ ID NO: 24890 - RNA, 20 nt, Artificial Sequence
  targeting sequence with TTCN PAM
uggaggggcuguagggagaa

SEQ ID NO: 24891 - RNA, 20 nt, Artificial Sequence
  targeting sequence with TTCN PAM
cccuacagccccuccaggaa

SEQ ID NO: 24892 - RNA, 20 nt, Artificial Sequence
  targeting sequence with TTCN PAM
ugaccauggugcuaggccug

SEQ ID NO: 24893 - RNA, 20 nt, Artificial Sequence
  targeting sequence with TTCN PAM
ucuguggcuaaggccaggcu

SEQ ID NO: 24894 - RNA, 20 nt, Artificial Sequence
  targeting sequence with TTCN PAM
ccaacgugcuccuccaggcu

SEQ ID NO: 24895 - RNA, 20 nt, Artificial Sequence
  targeting sequence with TTCN PAM
cugugccuugguuucuccaa

SEQ ID NO: 24896 - RNA, 20 nt, Artificial Sequence
  targeting sequence with TTCN PAM
gacaaacggcaaaggacaca

SEQ ID NO: 24897 - RNA, 20 nt, Artificial Sequence
  targeting sequence with TTCN PAM
gggaggccugccuugguuuc

SEQ ID NO: 24898 - RNA, 20 nt, Artificial Sequence
  targeting sequence with TTCN PAM
cugaccccucuggaagaggc

SEQ ID NO: 24899 - RNA, 20 nt, Artificial Sequence
  targeting sequence with TTCN PAM
agaggggucagggaaaccaa

SEQ ID NO: 24900 - RNA, 20 nt, Artificial Sequence
  targeting sequence with TTCN PAM
agaugguguccagcuggucu

SEQ ID NO: 24901 - RNA, 20 nt, Artificial Sequence
  targeting sequence with TTCN PAM
gcccuuccagauggugucca

SEQ ID NO: 24902 - RNA, 20 nt, Artificial Sequence
  targeting sequence with TTCN PAM
aggccaugccuguuuggggu

SEQ ID NO: 24903 - RNA, 20 nt, Artificial Sequence
  targeting sequence with TTCN PAM
caucuguaaaauggguacgc

SEQ ID NO: 24904 - RNA, 20 nt, Artificial Sequence
  targeting sequence with TTCN PAM
gaggggauggugccucccau

SEQ ID NO: 24905 - RNA, 20 nt, Artificial Sequence
  targeting sequence with TTCN PAM
auaagcccuagguggugggu

SEQ ID NO: 24906 - RNA, 20 nt, Artificial Sequence
  targeting sequence with TTCN PAM
gugcuaagcacuguaggugc

SEQ ID NO: 24907 - RNA, 20 nt, Artificial Sequence
  targeting sequence with TTCN PAM
caauuagcuaugcagaccac

SEQ ID NO: 24908 - RNA, 20 nt, Artificial Sequence
  targeting sequence with TTCN PAM
ugaagucaaagcauccgagg

SEQ ID NO: 24909 - RNA, 20 nt, Artificial Sequence
  targeting sequence with TTCN PAM
ggaagcgguggaguggcuug

SEQ ID NO: 24910 - RNA, 20 nt, Artificial Sequence
  targeting sequence with TTCN PAM
caggcgccagggcagagcag

SEQ ID NO: 24911 - RNA, 20 nt, Artificial Sequence
  targeting sequence with TTCN PAM
ugaagcuguuucucauuccg

SEQ ID NO: 24912 - RNA, 20 nt, Artificial Sequence
  targeting sequence with TTCN PAM
ugaagggggagcuggguguc

SEQ ID NO: 24913 - RNA, 20 nt, Artificial Sequence
  targeting sequence with TTCN PAM
cauuccggcccggccuggcc

SEQ ID NO: 24914 - RNA, 20 nt, Artificial Sequence
  targeting sequence with TTCN PAM
ggcccggccuggccccauuu

SEQ ID NO: 24915 - RNA, 20 nt, Artificial Sequence
  targeting sequence with TTCN PAM
agcuccccucccccuggguc

SEQ ID NO: 24916 - RNA, 20 nt, Artificial Sequence
  targeting sequence with TTCN PAM
cuggcccagggaaaaggcuu

SEQ ID NO: 24917 - RNA, 20 nt, Artificial Sequence
  targeting sequence with TTCN PAM
cugggccagggaagagccgc

SEQ ID NO: 24918 - RNA, 20 nt, Artificial Sequence
  targeting sequence with TTCN PAM
cuccccccagcaggaggggc

SEQ ID NO: 24919 - RNA, 20 nt, Artificial Sequence
  targeting sequence with TTCN PAM
ugcucugccccuccugcugg

SEQ ID NO: 24920 - RNA, 20 nt, Artificial Sequence
  targeting sequence with TTCN PAM
aagcccuggaacaguuuccc

SEQ ID NO: 24921 - RNA, 20 nt, Artificial Sequence
  targeting sequence with TTCN PAM
agggcuuggaaagacuggcu

SEQ ID NO: 24922 - RNA, 20 nt, Artificial Sequence
  targeting sequence with TTCN PAM
cucccagcuuccuccccuga

SEQ ID NO: 24923 - RNA, 20 nt, Artificial Sequence
  targeting sequence with TTCN PAM
uccccugaagggacuccagg

SEQ ID NO: 24924 - RNA, 20 nt, Artificial Sequence
  targeting sequence with TTCN PAM
ggggaggaagcugggaggga

SEQ ID NO: 24925 - RNA, 20 nt, Artificial Sequence
  targeting sequence with TTCN PAM
cggcuccuggccuggagucc

SEQ ID NO: 24926 - RNA, 20 nt, Artificial Sequence
  targeting sequence with TTCN PAM
cuggagaggcaacuauuucu

SEQ ID NO: 24927 - RNA, 20 nt, Artificial Sequence
  targeting sequence with TTCN PAM
cuccuggggcuggggggacu

SEQ ID NO: 24928 - RNA, 20 nt, Artificial Sequence
  targeting sequence with TTCN PAM
aucucacacccuccucccca

SEQ ID NO: 24929 - RNA, 20 nt, Artificial Sequence
  targeting sequence with TTCN PAM
uggcuguguccacagcgguc

SEQ ID NO: 24930 - RNA, 20 nt, Artificial Sequence
  targeting sequence with TTCN PAM
augagcuggggacacagagg

SEQ ID NO: 24931 - RNA, 20 nt, Artificial Sequence
  targeting sequence with TTCN PAM
cauaguaacaguucgguaga

SEQ ID NO: 24932 - RNA, 20 nt, Artificial Sequence
  targeting sequence with TTCN PAM
guagagugacaguagcaagc

SEQ ID NO: 24933 - RNA, 20 nt, Artificial Sequence
  targeting sequence with TTCN PAM
guauuaucucauucaacccu

SEQ ID NO: 24934 - RNA, 20 nt, Artificial Sequence
  targeting sequence with TTCN PAM
acccucaccacacccugaaa

SEQ ID NO: 24935 - RNA, 20 nt, Artificial Sequence
  targeting sequence with TTCN PAM
ggguguggugaggguugaau

SEQ ID NO: 24936 - RNA, 20 nt, Artificial Sequence
  targeting sequence with TTCN PAM
uuuacuguaaagcagcauca

SEQ ID NO: 24937 - RNA, 20 nt, Artificial Sequence
  targeting sequence with TTCN PAM
acucucugugccucaguuuc

SEQ ID NO: 24938 - RNA, 20 nt, Artificial Sequence
  targeting sequence with TTCN PAM
ggcugugugccccugggcaa

SEQ ID NO: 24939 - RNA, 20 nt, Artificial Sequence
  targeting sequence with TTCN PAM
uggcaaccauugguggcucc

SEQ ID NO: 24940 - RNA, 20 nt, Artificial Sequence
  targeting sequence with TTCN PAM
agcuccaagcggcugauuuc

SEQ ID NO: 24941 - RNA, 20 nt, Artificial Sequence
  targeting sequence with TTCN PAM
ccagcucaaaacccaggguu

SEQ ID NO: 24942 - RNA, 20 nt, Artificial Sequence
  targeting sequence with TTCN PAM
agagagcucagucaccucaa

SEQ ID NO: 24943 - RNA, 20 nt, Artificial Sequence
  targeting sequence with TTCN PAM
ccagccucugcccgcuaucu

SEQ ID NO: 24944 - RNA, 20 nt, Artificial Sequence
  targeting sequence with TTCN PAM
ugggccuggccuccacucca

SEQ ID NO: 24945 - RNA, 20 nt, Artificial Sequence
  targeting sequence with TTCN PAM
cucccccuccagcgcaugau

SEQ ID NO: 24946 - RNA, 20 nt, Artificial Sequence
  targeting sequence with TTCN PAM
ggguaaaggacgguggacua

SEQ ID NO: 24947 - RNA, 20 nt, Artificial Sequence
  targeting sequence with TTCN PAM
gcccuggcucagacauggcc

SEQ ID NO: 24948 - RNA, 20 nt, Artificial Sequence
  targeting sequence with TTCN PAM
aaaggccaugucugagccag

SEQ ID NO: 24949 - RNA, 20 nt, Artificial Sequence
  targeting sequence with TTCN PAM
uuccaaaggccaugucugag

SEQ ID NO: 24950 - RNA, 20 nt, Artificial Sequence
  targeting sequence with TTCN PAM
ucuuuccaaaggccaugucu

SEQ ID NO: 24951 - RNA, 20 nt, Artificial Sequence
  targeting sequence with TTCN PAM
gggcuuguccccacucggga

SEQ ID NO: 24952 - RNA, 20 nt, Artificial Sequence
  targeting sequence with TTCN PAM
cgaguggggacaagcccaga

SEQ ID NO: 24953 - RNA, 20 nt, Artificial Sequence
  targeting sequence with TTCN PAM
auggcaauccccacauggcu

SEQ ID NO: 24954 - RNA, 20 nt, Artificial Sequence
  targeting sequence with TTCN PAM
ggaaccagaucagccauguc

SEQ ID NO: 24955 - RNA, 20 nt, Artificial Sequence
  targeting sequence with TTCN PAM
ggaagggacccuguggcugc

SEQ ID NO: 24956 - RNA, 20 nt, Artificial Sequence
  targeting sequence with TTCN PAM
ccaaagcccugcuggcuccc

SEQ ID NO: 24957 - RNA, 20 nt, Artificial Sequence
  targeting sequence with TTCN PAM
ccucggccugcuacccaagc

SEQ ID NO: 24958 - RNA, 20 nt, Artificial Sequence
  targeting sequence with TTCN PAM
aacaucucugagccuuugcc

SEQ ID NO: 24959 - RNA, 20 nt, Artificial Sequence
  targeting sequence with TTCN PAM
aggcagagcacacgauaggg

SEQ ID NO: 24960 - RNA, 20 nt, Artificial Sequence
  targeting sequence with TTCN PAM
ccagccccaucugucaagug

SEQ ID NO: 24961 - RNA, 20 nt, Artificial Sequence
  targeting sequence with TTCN PAM
uggaggaggggagguuggag

SEQ ID NO: 24962 - RNA, 20 nt, Artificial Sequence
  targeting sequence with TTCN PAM
gggggcuccuggagaggguc

SEQ ID NO: 24963 - RNA, 20 nt, Artificial Sequence
  targeting sequence with TTCN PAM
ggguggccugcagagcugcc

SEQ ID NO: 24964 - RNA, 20 nt, Artificial Sequence
  targeting sequence with TTCN PAM
cacaggggccucggcggacg

SEQ ID NO: 24965 - RNA, 20 nt, Artificial Sequence
  targeting sequence with TTCN PAM
gcguccgccgaggccccugu

SEQ ID NO: 24966 - RNA, 20 nt, Artificial Sequence
  targeting sequence with TTCN PAM
cugggucucaguuuccucac

SEQ ID NO: 24967 - RNA, 20 nt, Artificial Sequence
  targeting sequence with TTCN PAM
ucaccuuuaaaaugggccca

SEQ ID NO: 24968 - RNA, 20 nt, Artificial Sequence
  targeting sequence with TTCN PAM
ccccuuccgacacccucugg

SEQ ID NO: 24969 - RNA, 20 nt, Artificial Sequence
  targeting sequence with TTCN PAM
gacacccucuggcucacacc

SEQ ID NO: 24970 - RNA, 20 nt, Artificial Sequence
  targeting sequence with TTCN PAM
gucaaagauuuuggaggaau

SEQ ID NO: 24971 - RNA, 20 nt, Artificial Sequence
  targeting sequence with TTCN PAM
uccaaaaucuuugaccgaag

SEQ ID NO: 24972 - RNA, 20 nt, Artificial Sequence
  targeting sequence with TTCN PAM
ggcuguagcgccugugaccc

SEQ ID NO: 24973 - RNA, 20 nt, Artificial Sequence
  targeting sequence with TTCN PAM
ggaccucuguuuccccuucc

SEQ ID NO: 24974 - RNA, 20 nt, Artificial Sequence
  targeting sequence with TTCN PAM
ccuuccauagacuggggaua

SEQ ID NO: 24975 - RNA, 20 nt, Artificial Sequence
  targeting sequence with TTCN PAM
auagacuggggauaacaguc

SEQ ID NO: 24976 - RNA, 20 nt, Artificial Sequence
  targeting sequence with TTCN PAM
gguucuggggagauuaaaag

SEQ ID NO: 24977 - RNA, 20 nt, Artificial Sequence
  targeting sequence with TTCN PAM
ggggagauuaaaagauaugu

SEQ ID NO: 24978 - RNA, 20 nt, Artificial Sequence
  targeting sequence with TTCN PAM
cuguguuagcccuuugcaga

SEQ ID NO: 24979 - RNA, 20 nt, Artificial Sequence
  targeting sequence with TTCN PAM
caagcaacaaccacaguaau

SEQ ID NO: 24980 - RNA, 20 nt, Artificial Sequence
  targeting sequence with TTCN PAM
ggugucagagggaaggcuuc

SEQ ID NO: 24981 - RNA, 20 nt, Artificial Sequence
  targeting sequence with TTCN PAM
cucugacaccagaacugccc

SEQ ID NO: 24982 - RNA, 20 nt, Artificial Sequence
  targeting sequence with TTCN PAM
uugccacuccaugggccaac

SEQ ID NO: 24983 - RNA, 20 nt, Artificial Sequence
  targeting sequence with TTCN PAM
ccgacccuggaguuggccca

SEQ ID NO: 24984 - RNA, 20 nt, Artificial Sequence
  targeting sequence with TTCN PAM
ccuaccugggccuccguucu

SEQ ID NO: 24985 - RNA, 20 nt, Artificial Sequence
  targeting sequence with TTCN PAM
cggcagcaaccaggacaugg

SEQ ID NO: 24986 - RNA, 20 nt, Artificial Sequence
  targeting sequence with TTCN PAM
auguccugguugcugccgug

SEQ ID NO: 24987 - RNA, 20 nt, Artificial Sequence
  targeting sequence with TTCN PAM
uuaaucuccauggagaccgg

SEQ ID NO: 24988 - RNA, 20 nt, Artificial Sequence
  targeting sequence with TTCN PAM
cccgccugugacucccgguc

SEQ ID NO: 24989 - RNA, 20 nt, Artificial Sequence
  targeting sequence with TTCN PAM
gccgggcccgaugcgcgugg

SEQ ID NO: 24990 - RNA, 20 nt, Artificial Sequence
  targeting sequence with TTCN PAM
gcaagggccacgcgcaucgg

SEQ ID NO: 24991 - RNA, 20 nt, Artificial Sequence
  targeting sequence with TTCN PAM
cugcgcucagcccacuuuau

SEQ ID NO: 24992 - RNA, 20 nt, Artificial Sequence
  targeting sequence with TTCN PAM
caucuauaaagugggcugag

SEQ ID NO: 24993 - RNA, 20 nt, Artificial Sequence
  targeting sequence with TTCN PAM
uggagccuccauuuucccau

SEQ ID NO: 24994 - RNA, 20 nt, Artificial Sequence
  targeting sequence with TTCN PAM
acagcuaggaaggggcagag

SEQ ID NO: 24995 - RNA, 20 nt, Artificial Sequence
  targeting sequence with TTCN PAM
uagcuguggaaagucccauc

SEQ ID NO: 24996 - RNA, 20 nt, Artificial Sequence
  targeting sequence with TTCN PAM
aauccugccucugccccuuc

SEQ ID NO: 24997 - RNA, 20 nt, Artificial Sequence
  targeting sequence with TTCN PAM
cagauucaaauccugccucu

SEQ ID NO: 24998 - RNA, 20 nt, Artificial Sequence
  targeting sequence with TTCN PAM
acagccaggcaggcgcacau

SEQ ID NO: 24999 - RNA, 20 nt, Artificial Sequence
  targeting sequence with TTCN PAM
cacugaccauugaacccaca

SEQ ID NO: 25000 - RNA, 20 nt, Artificial Sequence
  targeting sequence with TTCN PAM
auggucagugugaaugaugg

SEQ ID NO: 25001 - RNA, 20 nt, Artificial Sequence
  targeting sequence with TTCN PAM
agaggcugaugaucgcauuu

SEQ ID NO: 25002 - RNA, 20 nt, Artificial Sequence
  targeting sequence with TTCN PAM
gacaaaugcaacuagaaguu

SEQ ID NO: 25003 - RNA, 20 nt, Artificial Sequence
  targeting sequence with TTCN PAM
aguugcauuugucugaaaau

SEQ ID NO: 25004 - RNA, 20 nt, Artificial Sequence
  targeting sequence with TTCN PAM
uugccuccccugacuuccuc

SEQ ID NO: 25005 - RNA, 20 nt, Artificial Sequence
  targeting sequence with TTCN PAM
ucaggaagcugggucagccc

SEQ ID NO: 25006 - RNA, 20 nt, Artificial Sequence
  targeting sequence with TTCN PAM
ugaggaagucaggggaggca

SEQ ID NO: 25007 - RNA, 20 nt, Artificial Sequence
  targeting sequence with TTCN PAM
ggcagggcccauugugauag

SEQ ID NO: 25008 - RNA, 20 nt, Artificial Sequence
  targeting sequence with TTCN PAM
cccucuggcugggccauaga

SEQ ID NO: 25009 - RNA, 20 nt, Artificial Sequence
  targeting sequence with TTCN PAM
gcaguucccccucuggcugg

SEQ ID NO: 25010 - RNA, 20 nt, Artificial Sequence
  targeting sequence with TTCN PAM
ccaccacggagagcucacag

SEQ ID NO: 25011 - RNA, 20 nt, Artificial Sequence
  targeting sequence with TTCN PAM
ugguggcuggugagcuguga

SEQ ID NO: 25012 - RNA, 20 nt, Artificial Sequence
  targeting sequence with TTCN PAM
aucugcggauccagacccuc

SEQ ID NO: 25013 - RNA, 20 nt, Artificial Sequence
  targeting sequence with TTCN PAM
ccucucuuggccucaguuuc

SEQ ID NO: 25014 - RNA, 20 nt, Artificial Sequence
  targeting sequence with TTCN PAM
ccuucuguaagcuggggaug

SEQ ID NO: 25015 - RNA, 20 nt, Artificial Sequence
  targeting sequence with TTCN PAM
guaagcuggggaugaugaug

SEQ ID NO: 25016 - RNA, 20 nt, Artificial Sequence
  targeting sequence with TTCN PAM
cuccaaggagcccacaggcc

SEQ ID NO: 25017 - RNA, 20 nt, Artificial Sequence
  targeting sequence with TTCN PAM
agacagugcugcccuggacu

SEQ ID NO: 25018 - RNA, 20 nt, Artificial Sequence
  targeting sequence with TTCN PAM
cuccaucucagucucugugc

SEQ ID NO: 25019 - RNA, 20 nt, Artificial Sequence
  targeting sequence with TTCN PAM
ggcccuauuugaucucaucu

SEQ ID NO: 25020 - RNA, 20 nt, Artificial Sequence
  targeting sequence with TTCN PAM
ggugucuuuucucccucuug

SEQ ID NO: 25021 - RNA, 20 nt, Artificial Sequence
  targeting sequence with TTCN PAM
cccucuugauacuaauaccu

SEQ ID NO: 25022 - RNA, 20 nt, Artificial Sequence
  targeting sequence with TTCN PAM
ugggcacugcaugugagguu

SEQ ID NO: 25023 - RNA, 20 nt, Artificial Sequence
  targeting sequence with TTCN PAM
cauuauaaaacaggucuuau

SEQ ID NO: 25024 - RNA, 20 nt, Artificial Sequence
  targeting sequence with TTCN PAM
uucucauuauaaaacagguc

SEQ ID NO: 25025 - RNA, 20 nt, Artificial Sequence
  targeting sequence with TTCN PAM
cagggcugggagggaugucu

SEQ ID NO: 25026 - RNA, 20 nt, Artificial Sequence
  targeting sequence with TTCN PAM
ccaggccagagggucaucuc

SEQ ID NO: 25027 - RNA, 20 nt, Artificial Sequence
  targeting sequence with TTCN PAM
aggaggauuggcugagauga

SEQ ID NO: 25028 - RNA, 20 nt, Artificial Sequence
  targeting sequence with TTCN PAM
ucacugggagaucacuccca

SEQ ID NO: 25029 - RNA, 20 nt, Artificial Sequence
  targeting sequence with TTCN PAM
aagaugggcuuuacauuugg

SEQ ID NO: 25030 - RNA, 20 nt, Artificial Sequence
  targeting sequence with TTCN PAM
ugacgacgugcacccaccca

SEQ ID NO: 25031 - RNA, 20 nt, Artificial Sequence
  targeting sequence with TTCN PAM
accuuuacuauaaaaagaca

SEQ ID NO: 25032 - RNA, 20 nt, Artificial Sequence
  targeting sequence with TTCN PAM
aggugucuuuuuauaguaaa

SEQ ID NO: 25033 - RNA, 20 nt, Artificial Sequence
  targeting sequence with TTCN PAM
uuuuguuuuaaaaauacaaa

SEQ ID NO: 25034 - RNA, 20 nt, Artificial Sequence
  targeting sequence with TTCN PAM
uagguuggggagaaagacuu

SEQ ID NO: 25035 - RNA, 20 nt, Artificial Sequence
  targeting sequence with TTCN PAM
ccccaaccuaugaaugacca

SEQ ID NO: 25036 - RNA, 20 nt, Artificial Sequence
  targeting sequence with TTCN PAM
ccaagucuuucuccccaacc

SEQ ID NO: 25037 - RNA, 20 nt, Artificial Sequence
  targeting sequence with TTCN PAM
uuccccaagucuuucucccc

SEQ ID NO: 25038 - RNA, 20 nt, Artificial Sequence
  targeting sequence with TTCN PAM
cccaucaguggcacucaaca

SEQ ID NO: 25039 - RNA, 20 nt, Artificial Sequence
  targeting sequence with TTCN PAM
caacuggcuugcacuccaaa

SEQ ID NO: 25040 - RNA, 20 nt, Artificial Sequence
  targeting sequence with TTCN PAM
ucaaaucacaaccuguuugg

SEQ ID NO: 25041 - RNA, 20 nt, Artificial Sequence
  targeting sequence with TTCN PAM
ucacucaguuucucucaaaa

SEQ ID NO: 25042 - RNA, 20 nt, Artificial Sequence
  targeting sequence with TTCN PAM
cucaguuucucucaaaauau

SEQ ID NO: 25043 - RNA, 20 nt, Artificial Sequence
  targeting sequence with TTCN PAM
cucaaaauaucuuaacugcc

SEQ ID NO: 25044 - RNA, 20 nt, Artificial Sequence
  targeting sequence with TTCN PAM
acguauuuggggcaguuaag

SEQ ID NO: 25045 - RNA, 20 nt, Artificial Sequence
  targeting sequence with TTCN PAM
gagggcugcggggaccgagg

SEQ ID NO: 25046 - RNA, 20 nt, Artificial Sequence
  targeting sequence with TTCN PAM
cugccucuggccucacacuu

SEQ ID NO: 25047 - RNA, 20 nt, Artificial Sequence
  targeting sequence with TTCN PAM
gcagcuucucccuuuggguu

SEQ ID NO: 25048 - RNA, 20 nt, Artificial Sequence
  targeting sequence with TTCN PAM
cccuuuggguucucgggaag

SEQ ID NO: 25049 - RNA, 20 nt, Artificial Sequence
  targeting sequence with TTCN PAM
cgggaagaagguggagggca

SEQ ID NO: 25050 - RNA, 20 nt, Artificial Sequence
  targeting sequence with TTCN PAM
cgagaacccaaagggagaag

SEQ ID NO: 25051 - RNA, 20 nt, Artificial Sequence
  targeting sequence with TTCN PAM
ucccgagaacccaaagggag

SEQ ID NO: 25052 - RNA, 20 nt, Artificial Sequence
  targeting sequence with TTCN PAM
cagcugacaggacuugcccu

SEQ ID NO: 25053 - RNA, 20 nt, Artificial Sequence
  targeting sequence with TTCN PAM
ggguucccagcugacaggac

SEQ ID NO: 25054 - RNA, 20 nt, Artificial Sequence
  targeting sequence with TTCN PAM
ugccagggcccaggguucuu

SEQ ID NO: 25055 - RNA, 20 nt, Artificial Sequence
  targeting sequence with TTCN PAM
ucgugagacccucaagcagg

SEQ ID NO: 25056 - RNA, 20 nt, Artificial Sequence
  targeting sequence with TTCN PAM
ugagacccucaagcaggagc

SEQ ID NO: 25057 - RNA, 20 nt, Artificial Sequence
  targeting sequence with TTCN PAM
aaaggccuggcugagcugcc

SEQ ID NO: 25058 - RNA, 20 nt, Artificial Sequence
  targeting sequence with TTCN PAM
gcccugggguccugccccau

SEQ ID NO: 25059 - RNA, 20 nt, Artificial Sequence
  targeting sequence with TTCN PAM
cugucacuggcacugggugg

SEQ ID NO: 25060 - RNA, 20 nt, Artificial Sequence
  targeting sequence with TTCN PAM
ccuggucccaucuggcugga

SEQ ID NO: 25061 - RNA, 20 nt, Artificial Sequence
  targeting sequence with TTCN PAM
aggcuccugguucuccccag

SEQ ID NO: 25062 - RNA, 20 nt, Artificial Sequence
  targeting sequence with TTCN PAM
ccccagaccaaacucauccu

SEQ ID NO: 25063 - RNA, 20 nt, Artificial Sequence
  targeting sequence with TTCN PAM
ccagagguaccccaucacau

SEQ ID NO: 25064 - RNA, 20 nt, Artificial Sequence
  targeting sequence with TTCN PAM
gcuccuccaucccaucacuc

SEQ ID NO: 25065 - RNA, 20 nt, Artificial Sequence
  targeting sequence with TTCN PAM
cuggagacauggcuggccug

SEQ ID NO: 25066 - RNA, 20 nt, Artificial Sequence
  targeting sequence with TTCN PAM
cucagucgcaaauauaucuu

SEQ ID NO: 25067 - RNA, 20 nt, Artificial Sequence
  targeting sequence with TTCN PAM
uucacucagucgcaaauaua

SEQ ID NO: 25068 - RNA, 20 nt, Artificial Sequence
  targeting sequence with TTCN PAM
cgggaggcggccucagccuc

SEQ ID NO: 25069 - RNA, 20 nt, Artificial Sequence
  targeting sequence with TTCN PAM
caccagcuaccuaggggcuu

SEQ ID NO: 25070 - RNA, 20 nt, Artificial Sequence
  targeting sequence with TTCN PAM
aaaauaauagguagaagaau

SEQ ID NO: 25071 - RNA, 20 nt, Artificial Sequence
  targeting sequence with TTCN PAM
accuauuauuuuagaaagcc

SEQ ID NO: 25072 - RNA, 20 nt, Artificial Sequence
  targeting sequence with TTCN PAM
ucuaccuauuauuuuagaaa

SEQ ID NO: 25073 - RNA, 20 nt, Artificial Sequence
  targeting sequence with TTCN PAM
cgagcauuccccuucugcag

SEQ ID NO: 25074 - RNA, 20 nt, Artificial Sequence
  targeting sequence with TTCN PAM
ccuucugcagcggggagacu

SEQ ID NO: 25075 - RNA, 20 nt, Artificial Sequence
  targeting sequence with TTCN PAM
gcagcggggagacucaggug

SEQ ID NO: 25076 - RNA, 20 nt, Artificial Sequence
  targeting sequence with TTCN PAM
cuggcuaaaacccuucaugg

SEQ ID NO: 25077 - RNA, 20 nt, Artificial Sequence
  targeting sequence with TTCN PAM
uggcucccaggaccccagga

SEQ ID NO: 25078 - RNA, 20 nt, Artificial Sequence
  targeting sequence with TTCN PAM
cacucuacucgccuggccac

SEQ ID NO: 25079 - RNA, 20 nt, Artificial Sequence
  targeting sequence with TTCN PAM
cacaggcugcucccuuugcc

SEQ ID NO: 25080 - RNA, 20 nt, Artificial Sequence
  targeting sequence with TTCN PAM
ucuucuccggccucaccugg

SEQ ID NO: 25081 - RNA, 20 nt, Artificial Sequence
  targeting sequence with TTCN PAM
ccggccucaccuggcuuccu

SEQ ID NO: 25082 - RNA, 20 nt, Artificial Sequence
  targeting sequence with TTCN PAM
uccugcuccuccgcccccuc

SEQ ID NO: 25083 - RNA, 20 nt, Artificial Sequence
  targeting sequence with TTCN PAM
cccuuugcggcacgcauugc

SEQ ID NO: 25084 - RNA, 20 nt, Artificial Sequence
  targeting sequence with TTCN PAM
acucuugugggcugggcagg

SEQ ID NO: 25085 - RNA, 20 nt, Artificial Sequence
  targeting sequence with TTCN PAM
agccccagaugacaccucca

SEQ ID NO: 25086 - RNA, 20 nt, Artificial Sequence
  targeting sequence with TTCN PAM
gcagcuguaaacaccccacc

SEQ ID NO: 25087 - RNA, 20 nt, Artificial Sequence
  targeting sequence with TTCN PAM
uguuauuacucuaagggaca

SEQ ID NO: 25088 - RNA, 20 nt, Artificial Sequence
  targeting sequence with TTCN PAM
ucuuguuauuacucuaaggg

SEQ ID NO: 25089 - RNA, 20 nt, Artificial Sequence
  targeting sequence with TTCN PAM
ucuaguccuuaaaacaaugc

SEQ ID NO: 25090 - RNA, 20 nt, Artificial Sequence
  targeting sequence with TTCN PAM
cagaugaagaaacugaggcc

SEQ ID NO: 25091 - RNA, 20 nt, Artificial Sequence
  targeting sequence with TTCN PAM
ucugugaaguggggacagua

SEQ ID NO: 25092 - RNA, 20 nt, Artificial Sequence
  targeting sequence with TTCN PAM
ucaucugugaaguggggaca

SEQ ID NO: 25093 - RNA, 20 nt, Artificial Sequence
  targeting sequence with TTCN PAM
uuggccaaggucacacagcu

SEQ ID NO: 25094 - RNA, 20 nt, Artificial Sequence
  targeting sequence with TTCN PAM
cagcugugugaccuuggcca

SEQ ID NO: 25095 - RNA, 20 nt, Artificial Sequence
  targeting sequence with TTCN PAM
agucccacuuugucacuucc

SEQ ID NO: 25096 - RNA, 20 nt, Artificial Sequence
  targeting sequence with TTCN PAM
gaaucugucgcugcauagcu

SEQ ID NO: 25097 - RNA, 20 nt, Artificial Sequence
  targeting sequence with TTCN PAM
gaaccuagacuuugcaucag

SEQ ID NO: 25098 - RNA, 20 nt, Artificial Sequence
  targeting sequence with TTCN PAM
ugcuccaggcuguugccagc

SEQ ID NO: 25099 - RNA, 20 nt, Artificial Sequence
  targeting sequence with TTCN PAM
ccgugcccgcugugggcaca

SEQ ID NO: 25100 - RNA, 20 nt, Artificial Sequence
  targeting sequence with TTCN PAM
ccucuucgccgugcccgcug

SEQ ID NO: 25101 - RNA, 20 nt, Artificial Sequence
  targeting sequence with TTCN PAM
acacccuucuccucuucgcc

SEQ ID NO: 25102 - RNA, 20 nt, Artificial Sequence
  targeting sequence with TTCN PAM
uuggucacccucccuguguu

SEQ ID NO: 25103 - RNA, 20 nt, Artificial Sequence
  targeting sequence with TTCN PAM
ggcugcggccuuccuugguc

SEQ ID NO: 25104 - RNA, 20 nt, Artificial Sequence
  targeting sequence with TTCN PAM
ccaccccaaggccacagauu

SEQ ID NO: 25105 - RNA, 20 nt, Artificial Sequence
  targeting sequence with TTCN PAM
ccacucuguccuggggcugu

SEQ ID NO: 25106 - RNA, 20 nt, Artificial Sequence
  targeting sequence with TTCN PAM
cuaccuaaggggacagggcc

SEQ ID NO: 25107 - RNA, 20 nt, Artificial Sequence
  targeting sequence with TTCN PAM
cacgguccgcucccucggug

SEQ ID NO: 25108 - RNA, 20 nt, Artificial Sequence
  targeting sequence with TTCN PAM
gguucccacgguccgcuccc

SEQ ID NO: 25109 - RNA, 20 nt, Artificial Sequence
  targeting sequence with TTCN PAM
ugccagagggggagggaacc

SEQ ID NO: 25110 - RNA, 20 nt, Artificial Sequence
  targeting sequence with TTCN PAM
cucccccucuggcaagaacc

SEQ ID NO: 25111 - RNA, 20 nt, Artificial Sequence
  targeting sequence with TTCN PAM
uuaggccagcccaggguucc

SEQ ID NO: 25112 - RNA, 20 nt, Artificial Sequence
  targeting sequence with TTCN PAM
ggcccugugucucggcccuu

SEQ ID NO: 25113 - RNA, 20 nt, Artificial Sequence
  targeting sequence with TTCN PAM
uccaguaguuucaggcccug

SEQ ID NO: 25114 - RNA, 20 nt, Artificial Sequence
  targeting sequence with TTCN PAM
cuccauucagcgacucccca

SEQ ID NO: 25115 - RNA, 20 nt, Artificial Sequence
  targeting sequence with TTCN PAM
gcgacuccccacugagaccc

SEQ ID NO: 25116 - RNA, 20 nt, Artificial Sequence
  targeting sequence with TTCN PAM
ucucgcaggcaacuguguuu

SEQ ID NO: 25117 - RNA, 20 nt, Artificial Sequence
  targeting sequence with TTCN PAM
uccaccaucuccaccccaga

SEQ ID NO: 25118 - RNA, 20 nt, Artificial Sequence
  targeting sequence with TTCN PAM
ggguggccggccagauggug

SEQ ID NO: 25119 - RNA, 20 nt, Artificial Sequence
  targeting sequence with TTCN PAM
cccaaggucgaggucggucu

SEQ ID NO: 25120 - RNA, 20 nt, Artificial Sequence
  targeting sequence with TTCN PAM
uucucccaaggucgaggucg

SEQ ID NO: 25121 - RNA, 20 nt, Artificial Sequence
  targeting sequence with TTCN PAM
caaagccccaguguugggcc

SEQ ID NO: 25122 - RNA, 20 nt, Artificial Sequence
  targeting sequence with TTCN PAM
ucugugggcgggcccaacac

SEQ ID NO: 25123 - RNA, 20 nt, Artificial Sequence
  targeting sequence with TTCN PAM
ugagauuaaccauuccucug

SEQ ID NO: 25124 - RNA, 20 nt, Artificial Sequence
  targeting sequence with TTCN PAM
ugucacagccauggagaagg

SEQ ID NO: 25125 - RNA, 20 nt, Artificial Sequence
  targeting sequence with TTCN PAM
ccauggcugugacaagaauu

SEQ ID NO: 25126 - RNA, 20 nt, Artificial Sequence
  targeting sequence with TTCN PAM
uuggggccccacccuguccc

SEQ ID NO: 25127 - RNA, 20 nt, Artificial Sequence
  targeting sequence with TTCN PAM
uguggugacccaagccuucc

SEQ ID NO: 25128 - RNA, 20 nt, Artificial Sequence
  targeting sequence with TTCN PAM
gcauuuugcugauggagaug

SEQ ID NO: 25129 - RNA, 20 nt, Artificial Sequence
  targeting sequence with TTCN PAM
uaagggaauggcaggcagug

SEQ ID NO: 25130 - RNA, 20 nt, Artificial Sequence
  targeting sequence with TTCN PAM
cuuaggaagcugcaucucca

SEQ ID NO: 25131 - RNA, 20 nt, Artificial Sequence
  targeting sequence with TTCN PAM
gcuccacugccugccauucc

SEQ ID NO: 25132 - RNA, 20 nt, Artificial Sequence
  targeting sequence with TTCN PAM
cacacccuccacccaucuga

SEQ ID NO: 25133 - RNA, 20 nt, Artificial Sequence
  targeting sequence with TTCN PAM
ggggccucauuccucagggu

SEQ ID NO: 25134 - RNA, 20 nt, Artificial Sequence
  targeting sequence with TTCN PAM
ucagggugaacuauggggau

SEQ ID NO: 25135 - RNA, 20 nt, Artificial Sequence
  targeting sequence with TTCN PAM
cccugaggaaugaggcccca

SEQ ID NO: 25136 - RNA, 20 nt, Artificial Sequence
  targeting sequence with TTCN PAM
uggcaagggauugcuccuca

SEQ ID NO: 25137 - RNA, 20 nt, Artificial Sequence
  targeting sequence with TTCN PAM
uuucagggaaccacaccaag

SEQ ID NO: 25138 - RNA, 20 nt, Artificial Sequence
  targeting sequence with TTCN PAM
gggaaccacaccaagucccc

SEQ ID NO: 25139 - RNA, 20 nt, Artificial Sequence
  targeting sequence with TTCN PAM
cugaaaggaaguucauggca

SEQ ID NO: 25140 - RNA, 20 nt, Artificial Sequence
  targeting sequence with TTCN PAM
gucaaccuggccccccuugc

SEQ ID NO: 25141 - RNA, 20 nt, Artificial Sequence
  targeting sequence with TTCN PAM
ccacugagccccacggcccu

SEQ ID NO: 25142 - RNA, 20 nt, Artificial Sequence
  targeting sequence with TTCN PAM
caucccuccauucuccuggc

SEQ ID NO: 25143 - RNA, 20 nt, Artificial Sequence
  targeting sequence with TTCN PAM
ccuggcccuggcaucugccc

SEQ ID NO: 25144 - RNA, 20 nt, Artificial Sequence
  targeting sequence with TTCN PAM
ggacuuggaucucagagugc

SEQ ID NO: 25145 - RNA, 20 nt, Artificial Sequence
  targeting sequence with TTCN PAM
aauccaccucugcuagugcc

SEQ ID NO: 25146 - RNA, 20 nt, Artificial Sequence
  targeting sequence with TTCN PAM
ucaucuguaaaaugugauga

SEQ ID NO: 25147 - RNA, 20 nt, Artificial Sequence
  targeting sequence with TTCN PAM
ucuguaaaaugugaugagaa

SEQ ID NO: 25148 - RNA, 20 nt, Artificial Sequence
  targeting sequence with TTCN PAM
caucacauuuuacagaugaa

SEQ ID NO: 25149 - RNA, 20 nt, Artificial Sequence
  targeting sequence with TTCN PAM
gagaacugggaauugugaca

SEQ ID NO: 25150 - RNA, 20 nt, Artificial Sequence
  targeting sequence with TTCN PAM
cagaacaacccucucaggua

SEQ ID NO: 25151 - RNA, 20 nt, Artificial Sequence
  targeting sequence with TTCN PAM
caguucucagaacaacccuc

SEQ ID NO: 25152 - RNA, 20 nt, Artificial Sequence
  targeting sequence with TTCN PAM
ugagcaccuaguauguacca

SEQ ID NO: 25153 - RNA, 20 nt, Artificial Sequence
  targeting sequence with TTCN PAM
gcaaauauuuccugagcacc

SEQ ID NO: 25154 - RNA, 20 nt, Artificial Sequence
  targeting sequence with TTCN PAM
ccuauucugcaaauauuucc

SEQ ID NO: 25155 - RNA, 20 nt, Artificial Sequence
  targeting sequence with TTCN PAM
ggccccagcuugcuggcaca

SEQ ID NO: 25156 - RNA, 20 nt, Artificial Sequence
  targeting sequence with TTCN PAM
ggggccacugcgugagccug

SEQ ID NO: 25157 - RNA, 20 nt, Artificial Sequence
  targeting sequence with TTCN PAM
cgcgugcacaccuggguucc

SEQ ID NO: 25158 - RNA, 20 nt, Artificial Sequence
  targeting sequence with TTCN PAM
acguacaucuggaucucugc

SEQ ID NO: 25159 - RNA, 20 nt, Artificial Sequence
  targeting sequence with TTCN PAM
cgcccgcccccgcccccgcc

SEQ ID NO: 25160 - RNA, 20 nt, Artificial Sequence
  targeting sequence with TTCN PAM
acgaagcaggcggugcgcgc

SEQ ID NO: 25161 - RNA, 20 nt, Artificial Sequence
  targeting sequence with TTCN PAM
uggaaccggcgcccgacgug

SEQ ID NO: 25162 - RNA, 20 nt, Artificial Sequence
  targeting sequence with TTCN PAM
ccgacgugcgagccgccauc

SEQ ID NO: 25163 - RNA, 20 nt, Artificial Sequence
  targeting sequence with TTCN PAM
gcuucgccgacgugcgagcc

SEQ ID NO: 25164 - RNA, 20 nt, Artificial Sequence
  targeting sequence with TTCN PAM
agcggccccagggguccccc

SEQ ID NO: 25165 - RNA, 20 nt, Artificial Sequence
  targeting sequence with TTCN PAM
cagcccgggagcggcucuuu

SEQ ID NO: 25166 - RNA, 20 nt, Artificial Sequence
  targeting sequence with TTCN PAM
uggcgucgccgccggcgccg

SEQ ID NO: 25167 - RNA, 20 nt, Artificial Sequence
  targeting sequence with TTCN PAM
ugcacccguccgacccgccg

SEQ ID NO: 25168 - RNA, 20 nt, Artificial Sequence
  targeting sequence with TTCN PAM
ugagcgccuuccugcacccg

SEQ ID NO: 25169 - RNA, 20 nt, Artificial Sequence
  targeting sequence with TTCN PAM
accucaaccccuccgacgac

SEQ ID NO: 25170 - RNA, 20 nt, Artificial Sequence
  targeting sequence with TTCN PAM
ccuucgaccucaaccccucc

SEQ ID NO: 25171 - RNA, 20 nt, Artificial Sequence
  targeting sequence with TTCN PAM
cgaagcggugguccuccagg

SEQ ID NO: 25172 - RNA, 20 nt, Artificial Sequence
  targeting sequence with TTCN PAM
agaacacgcccgagaucgcc

SEQ ID NO: 25173 - RNA, 20 nt, Artificial Sequence
  targeting sequence with TTCN PAM
cgcgcaaccgcagccuggag

SEQ ID NO: 25174 - RNA, 20 nt, Artificial Sequence
  targeting sequence with TTCN PAM
ucccgcgcaaccgcagccug

SEQ ID NO: 25175 - RNA, 20 nt, Artificial Sequence
  targeting sequence with TTCN PAM
gccucccgccgcgggcgcgg

SEQ ID NO: 25176 - RNA, 20 nt, Artificial Sequence
  targeting sequence with TTCN PAM
ggugguuggccgccacguuc

SEQ ID NO: 25177 - RNA, 20 nt, Artificial Sequence
  targeting sequence with TTCN PAM
gcaugcuggggaacaccgug

SEQ ID NO: 25178 - RNA, 20 nt, Artificial Sequence
  targeting sequence with TTCN PAM
ccagcaugcugaacguggcg

SEQ ID NO: 25179 - RNA, 20 nt, Artificial Sequence
  targeting sequence with TTCN PAM
cgcccgccgcgccgcccgcc

SEQ ID NO: 25180 - RNA, 20 nt, Artificial Sequence
  targeting sequence with TTCN PAM
gccagcugcggcgccggggc

SEQ ID NO: 25181 - RNA, 20 nt, Artificial Sequence
  targeting sequence with TTCN PAM
cccuggacggcgcggcgggg

SEQ ID NO: 25182 - RNA, 20 nt, Artificial Sequence
  targeting sequence with TTCN PAM
ccucgcccacgcccaccaac

SEQ ID NO: 25183 - RNA, 20 nt, Artificial Sequence
  targeting sequence with TTCN PAM
agacgccgccgcggugcccg

SEQ ID NO: 25184 - RNA, 20 nt, Artificial Sequence
  targeting sequence with TTCN PAM
ugcccgcgccagccgccccc

SEQ ID NO: 25185 - RNA, 20 nt, Artificial Sequence
  targeting sequence with TTCN PAM
ucccacuuggccgcuuggcc

SEQ ID NO: 25186 - RNA, 20 nt, Artificial Sequence
  targeting sequence with TTCN PAM
cuuuuccgcccucuccccca

SEQ ID NO: 25187 - RNA, 20 nt, Artificial Sequence
  targeting sequence with TTCN PAM
gcccucucccccaccccguc

SEQ ID NO: 25188 - RNA, 20 nt, Artificial Sequence
  targeting sequence with TTCN PAM
ccggguucugccucugcuuc

SEQ ID NO: 25189 - RNA, 20 nt, Artificial Sequence
  targeting sequence with TTCN PAM
gccucugcuucuccuucucc

SEQ ID NO: 25190 - RNA, 20 nt, Artificial Sequence
  targeting sequence with TTCN PAM
ccuucucccuccgacuccgc

SEQ ID NO: 25191 - RNA, 20 nt, Artificial Sequence
  targeting sequence with TTCN PAM
cccuccgacuccgcuucgcu

SEQ ID NO: 25192 - RNA, 20 nt, Artificial Sequence
  targeting sequence with TTCN PAM
cucuccagucccuggcagcc

SEQ ID NO: 25193 - RNA, 20 nt, Artificial Sequence
  targeting sequence with TTCN PAM
agucuccuucucucuccugc

SEQ ID NO: 25194 - RNA, 20 nt, Artificial Sequence
  targeting sequence with TTCN PAM
cucuccugcuccguuuuucc

SEQ ID NO: 25195 - RNA, 20 nt, Artificial Sequence
  targeting sequence with TTCN PAM
gucccugacgcucgcucccu

SEQ ID NO: 25196 - RNA, 20 nt, Artificial Sequence
  targeting sequence with TTCN PAM
uucucccucugccuucccga

SEQ ID NO: 25197 - RNA, 20 nt, Artificial Sequence
  targeting sequence with TTCN PAM
cccucugccuucccgaaccc

SEQ ID NO: 25198 - RNA, 20 nt, Artificial Sequence
  targeting sequence with TTCN PAM
cgaacccugugucuccccuc

SEQ ID NO: 25199 - RNA, 20 nt, Artificial Sequence
  targeting sequence with TTCN PAM
ggaaggcagagggagaagga

SEQ ID NO: 25200 - RNA, 20 nt, Artificial Sequence
  targeting sequence with TTCN PAM
caggcacuguccaggccuuc

SEQ ID NO: 25201 - RNA, 20 nt, Artificial Sequence
  targeting sequence with TTCN PAM
cucccccggugccggccagu

SEQ ID NO: 25202 - RNA, 20 nt, Artificial Sequence
  targeting sequence with TTCN PAM
ucauuuauauaucugacccu

SEQ ID NO: 25203 - RNA, 20 nt, Artificial Sequence
  targeting sequence with TTCN PAM
ucucuccauguuuuccucau

SEQ ID NO: 25204 - RNA, 20 nt, Artificial Sequence
  targeting sequence with TTCN PAM
agccaguggcccacaaccga

SEQ ID NO: 25205 - RNA, 20 nt, Artificial Sequence
  targeting sequence with TTCN PAM
cugacauccucccaggcuua

SEQ ID NO: 25206 - RNA, 20 nt, Artificial Sequence
  targeting sequence with TTCN PAM
acuaagccugggaggauguc

SEQ ID NO: 25207 - RNA, 20 nt, Artificial Sequence
  targeting sequence with TTCN PAM
ugaucucaaaagcagcguua

SEQ ID NO: 25208 - RNA, 20 nt, Artificial Sequence
  targeting sequence with TTCN PAM
aaggucacagcccugugagg

SEQ ID NO: 25209 - RNA, 20 nt, Artificial Sequence
  targeting sequence with TTCN PAM
ucacagauucccccgaggcg

SEQ ID NO: 25210 - RNA, 20 nt, Artificial Sequence
  targeting sequence with TTCN PAM
cccgaggcgagcgcuauugg

SEQ ID NO: 25211 - RNA, 20 nt, Artificial Sequence
  targeting sequence with TTCN PAM
agauauggaaaccaaggcug

SEQ ID NO: 25212 - RNA, 20 nt, Artificial Sequence
  targeting sequence with TTCN PAM
auaucuggaagauggguuac

SEQ ID NO: 25213 - RNA, 20 nt, Artificial Sequence
  targeting sequence with TTCN PAM
ccucagccuugguuuccaua

SEQ ID NO: 25214 - RNA, 20 nt, Artificial Sequence
  targeting sequence with TTCN PAM
aacacuguagcucugcuccu

SEQ ID NO: 25215 - RNA, 20 nt, Artificial Sequence
  targeting sequence with TTCN PAM
gcuccgaccucucagaacgg

SEQ ID NO: 25216 - RNA, 20 nt, Artificial Sequence
  targeting sequence with TTCN PAM
gagaggucggagcugaaggg

SEQ ID NO: 25217 - RNA, 20 nt, Artificial Sequence
  targeting sequence with TTCN PAM
acagggugcccggugggccu

SEQ ID NO: 25218 - RNA, 20 nt, Artificial Sequence
  targeting sequence with TTCN PAM
ucuuucccacccaaccagga

SEQ ID NO: 25219 - RNA, 20 nt, Artificial Sequence
  targeting sequence with TTCN PAM
cacccaaccaggaaggaagg

SEQ ID NO: 25220 - RNA, 20 nt, Artificial Sequence
  targeting sequence with TTCN PAM
ugguugggugggaaagagga

SEQ ID NO: 25221 - RNA, 20 nt, Artificial Sequence
  targeting sequence with TTCN PAM
uuccugguugggugggaaag

SEQ ID NO: 25222 - RNA, 20 nt, Artificial Sequence
  targeting sequence with TTCN PAM
ugccggccccauggugcaca

SEQ ID NO: 25223 - RNA, 20 nt, Artificial Sequence
  targeting sequence with TTCN PAM
cucaacacccucgccuuccu

SEQ ID NO: 25224 - RNA, 20 nt, Artificial Sequence
  targeting sequence with TTCN PAM
ugccauccugcccgccuugu

SEQ ID NO: 25225 - RNA, 20 nt, Artificial Sequence
  targeting sequence with TTCN PAM
agaccccucagcccuggucu

SEQ ID NO: 25226 - RNA, 20 nt, Artificial Sequence
  targeting sequence with TTCN PAM
ugcagcucaacacucccggc

SEQ ID NO: 25227 - RNA, 20 nt, Artificial Sequence
  targeting sequence with TTCN PAM
ucucuggauggagaaggcgc

SEQ ID NO: 25228 - RNA, 20 nt, Artificial Sequence
  targeting sequence with TTCN PAM
ccauccagagaggaagacag

SEQ ID NO: 25229 - RNA, 20 nt, Artificial Sequence
  targeting sequence with TTCN PAM
uaucugucuugcuccucccg

SEQ ID NO: 25230 - RNA, 20 nt, Artificial Sequence
  targeting sequence with TTCN PAM
cucucuuugucucuccuucu

SEQ ID NO: 25231 - RNA, 20 nt, Artificial Sequence
  targeting sequence with TTCN PAM
cucagugucuugcccccuuc

SEQ ID NO: 25232 - RNA, 20 nt, Artificial Sequence
  targeting sequence with TTCN PAM
cuuuccacucuucaucuguc

SEQ ID NO: 25233 - RNA, 20 nt, Artificial Sequence
  targeting sequence with TTCN PAM
acucuucaucugucucucug

SEQ ID NO: 25234 - RNA, 20 nt, Artificial Sequence
  targeting sequence with TTCN PAM
ucugucucucugugucucua

SEQ ID NO: 25235 - RNA, 20 nt, Artificial Sequence
  targeting sequence with TTCN PAM
uuccugucucccgcucaucu

SEQ ID NO: 25236 - RNA, 20 nt, Artificial Sequence
  targeting sequence with TTCN PAM
ugucucccgcucaucugguu

SEQ ID NO: 25237 - RNA, 20 nt, Artificial Sequence
  targeting sequence with TTCN PAM
ucuugcugcauccugcagcu

SEQ ID NO: 25238 - RNA, 20 nt, Artificial Sequence
  targeting sequence with TTCN PAM
ccuagagagcuccuaaaccc

SEQ ID NO: 25239 - RNA, 20 nt, Artificial Sequence
  targeting sequence with TTCN PAM
ggucugaguauccucacauc

SEQ ID NO: 25240 - RNA, 20 nt, Artificial Sequence
  targeting sequence with TTCN PAM
caccuccaguugaugugagg

SEQ ID NO: 25241 - RNA, 20 nt, Artificial Sequence
  targeting sequence with TTCN PAM
ucaacuguaaaaugaggaca

SEQ ID NO: 25242 - RNA, 20 nt, Artificial Sequence
  targeting sequence with TTCN PAM
gcuacgauuguccucauuuu

SEQ ID NO: 25243 - RNA, 20 nt, Artificial Sequence
  targeting sequence with TTCN PAM
ccaucucacacccucccagg

SEQ ID NO: 25244 - RNA, 20 nt, Artificial Sequence
  targeting sequence with TTCN PAM
ccccgccuuguggcagugaa

SEQ ID NO: 25245 - RNA, 20 nt, Artificial Sequence
  targeting sequence with TTCN PAM
cugccacaaggcggggagaa

SEQ ID NO: 25246 - RNA, 20 nt, Artificial Sequence
  targeting sequence with TTCN PAM
ggggucaugguucacugcca

SEQ ID NO: 25247 - RNA, 20 nt, Artificial Sequence
  targeting sequence with TTCN PAM
cucucaccgucugguggcuc

SEQ ID NO: 25248 - RNA, 20 nt, Artificial Sequence
  targeting sequence with TTCN PAM
cagauggggaaacugagggg

SEQ ID NO: 25249 - RNA, 20 nt, Artificial Sequence
  targeting sequence with TTCN PAM
ccaucugugaaauggguuug

SEQ ID NO: 25250 - RNA, 20 nt, Artificial Sequence
  targeting sequence with TTCN PAM
auccuuaccuugcuaaugcc

SEQ ID NO: 25251 - RNA, 20 nt, Artificial Sequence
  targeting sequence with TTCN PAM
cccuucuacccauuagcugg

SEQ ID NO: 25252 - RNA, 20 nt, Artificial Sequence
  targeting sequence with TTCN PAM
acccauuagcugggagcacc

SEQ ID NO: 25253 - RNA, 20 nt, Artificial Sequence
  targeting sequence with TTCN PAM
gccaguaauugucagcaccu

SEQ ID NO: 25254 - RNA, 20 nt, Artificial Sequence
  targeting sequence with TTCN PAM
uucagccaguaauugucagc

SEQ ID NO: 25255 - RNA, 20 nt, Artificial Sequence
  targeting sequence with TTCN PAM
uucauucagccaguaauugu

SEQ ID NO: 25256 - RNA, 20 nt, Artificial Sequence
  targeting sequence with TTCN PAM
uuuauucauucauucagcca

SEQ ID NO: 25257 - RNA, 20 nt, Artificial Sequence
  targeting sequence with TTCN PAM
uuccuuuauucauucauuca

SEQ ID NO: 25258 - RNA, 20 nt, Artificial Sequence
  targeting sequence with TTCN PAM
cuggccuuacuaagaugcaa

SEQ ID NO: 25259 - RNA, 20 nt, Artificial Sequence
  targeting sequence with TTCN PAM
uccagagggaauuuuggagg

SEQ ID NO: 25260 - RNA, 20 nt, Artificial Sequence
  targeting sequence with TTCN PAM
agagggaauuuuggagggaa

SEQ ID NO: 25261 - RNA, 20 nt, Artificial Sequence
  targeting sequence with TTCN PAM
cucuggaagaacaccucauu

SEQ ID NO: 25262 - RNA, 20 nt, Artificial Sequence
  targeting sequence with TTCN PAM
cuccaaaauucccucuggaa

SEQ ID NO: 25263 - RNA, 20 nt, Artificial Sequence
  targeting sequence with TTCN PAM
ucuccccuugguucccucca

SEQ ID NO: 25264 - RNA, 20 nt, Artificial Sequence
  targeting sequence with TTCN PAM
aaguuaguuauugcuggguc

SEQ ID NO: 25265 - RNA, 20 nt, Artificial Sequence
  targeting sequence with TTCN PAM
uuccaaguuaguuauugcug

SEQ ID NO: 25266 - RNA, 20 nt, Artificial Sequence
  targeting sequence with TTCN PAM
ggguuaguucauuccaaguu

SEQ ID NO: 25267 - RNA, 20 nt, Artificial Sequence
  targeting sequence with TTCN PAM
cacugcaauuugggccuuuu

SEQ ID NO: 25268 - RNA, 20 nt, Artificial Sequence
  targeting sequence with TTCN PAM
guuuuuguucaagucugauu

SEQ ID NO: 25269 - RNA, 20 nt, Artificial Sequence
  targeting sequence with TTCN PAM
agucugauuauaucaaggaa

SEQ ID NO: 25270 - RNA, 20 nt, Artificial Sequence
  targeting sequence with TTCN PAM
uugauauaaucagacuugaa

SEQ ID NO: 25271 - RNA, 20 nt, Artificial Sequence
  targeting sequence with TTCN PAM
cucuauuaaaaagagacagu

SEQ ID NO: 25272 - RNA, 20 nt, Artificial Sequence
  targeting sequence with TTCN PAM
agcacgcugaugucaacagc

SEQ ID NO: 25273 - RNA, 20 nt, Artificial Sequence
  targeting sequence with TTCN PAM
uuguacuugccguuacuuuc

SEQ ID NO: 25274 - RNA, 20 nt, Artificial Sequence
  targeting sequence with TTCN PAM
gguuuuggcaagugcuacug

SEQ ID NO: 25275 - RNA, 20 nt, Artificial Sequence
  targeting sequence with TTCN PAM
auguacaguaaugauguaaa

SEQ ID NO: 25276 - RNA, 20 nt, Artificial Sequence
  targeting sequence with TTCN PAM
uugauaaaugcauugauuga

SEQ ID NO: 25277 - RNA, 20 nt, Artificial Sequence
  targeting sequence with TTCN PAM
aucaaugcauuuaucaagga

SEQ ID NO: 25278 - RNA, 20 nt, Artificial Sequence
  targeting sequence with TTCN PAM
cauuugucuuuaacucacuu

SEQ ID NO: 25279 - RNA, 20 nt, Artificial Sequence
  targeting sequence with TTCN PAM
ggcauuuugguggcaucugg

SEQ ID NO: 25280 - RNA, 20 nt, Artificial Sequence
  targeting sequence with TTCN PAM
caaauuucaggcauuuuggu

SEQ ID NO: 25281 - RNA, 20 nt, Artificial Sequence
  targeting sequence with TTCN PAM
aaggcacugcuggacauuuc

SEQ ID NO: 25282 - RNA, 20 nt, Artificial Sequence
  targeting sequence with TTCN PAM
ccgagccagcauagccguug

SEQ ID NO: 25283 - RNA, 20 nt, Artificial Sequence
  targeting sequence with TTCN PAM
accccacugggugggcuucc

SEQ ID NO: 25284 - RNA, 20 nt, Artificial Sequence
  targeting sequence with TTCN PAM
cacccuguccuguccauucu

SEQ ID NO: 25285 - RNA, 20 nt, Artificial Sequence
  targeting sequence with TTCN PAM
caccucugacugcccagggc

SEQ ID NO: 25286 - RNA, 20 nt, Artificial Sequence
  targeting sequence with TTCN PAM
ucugucuccucacagcucug

SEQ ID NO: 25287 - RNA, 20 nt, Artificial Sequence
  targeting sequence with TTCN PAM
ucuucaauuggaaaaaauaa

SEQ ID NO: 25288 - RNA, 20 nt, Artificial Sequence
  targeting sequence with TTCN PAM
ucaauuggaaaaaauaacag

SEQ ID NO: 25289 - RNA, 20 nt, Artificial Sequence
  targeting sequence with TTCN PAM
auuggaaaaaauaacagugg

SEQ ID NO: 25290 - RNA, 20 nt, Artificial Sequence
  targeting sequence with TTCN PAM
aauugaagaagaaaaacauu

SEQ ID NO: 25291 - RNA, 20 nt, Artificial Sequence
  targeting sequence with TTCN PAM
cagaggccaggcccaaggga

SEQ ID NO: 25292 - RNA, 20 nt, Artificial Sequence
  targeting sequence with TTCN PAM
uugcaggaaaugccccugca

SEQ ID NO: 25293 - RNA, 20 nt, Artificial Sequence
  targeting sequence with TTCN PAM
ugcaaggaaacguucucaga

SEQ ID NO: 25294 - RNA, 20 nt, Artificial Sequence
  targeting sequence with TTCN PAM
uguggcugaggcggugcucu

SEQ ID NO: 25295 - RNA, 20 nt, Artificial Sequence
  targeting sequence with TTCN PAM
agcaccuuccuguggcugag

SEQ ID NO: 25296 - RNA, 20 nt, Artificial Sequence
  targeting sequence with TTCN PAM
cgggggcuggacccgucuca

SEQ ID NO: 25297 - RNA, 20 nt, Artificial Sequence
  targeting sequence with TTCN PAM
ccgugggagcaacccugcgg

SEQ ID NO: 25298 - RNA, 20 nt, Artificial Sequence
  targeting sequence with TTCN PAM
cacucauaggugggaacuga

SEQ ID NO: 25299 - RNA, 20 nt, Artificial Sequence
  targeting sequence with TTCN PAM
guccuugcgauaguuugcuc

SEQ ID NO: 25300 - RNA, 20 nt, Artificial Sequence
  targeting sequence with TTCN PAM
gagcaaacuaucgcaaggac

SEQ ID NO: 25301 - RNA, 20 nt, Artificial Sequence
  targeting sequence with TTCN PAM
agcuucauccaugucccuac

SEQ ID NO: 25302 - RNA, 20 nt, Artificial Sequence
  targeting sequence with TTCN PAM
uccaugucccuacaaaggac

SEQ ID NO: 25303 - RNA, 20 nt, Artificial Sequence
  targeting sequence with TTCN PAM
uguccuuuguagggacaugg

SEQ ID NO: 25304 - RNA, 20 nt, Artificial Sequence
  targeting sequence with TTCN PAM
augguguauaugugccacau

SEQ ID NO: 25305 - RNA, 20 nt, Artificial Sequence
  targeting sequence with TTCN PAM
uaauccagucuaucauugau

SEQ ID NO: 25306 - RNA, 20 nt, Artificial Sequence
  targeting sequence with TTCN PAM
ccucuccuccugagcacaga

SEQ ID NO: 25307 - RNA, 20 nt, Artificial Sequence
  targeting sequence with TTCN PAM
ucucaucucuguguccccgu

SEQ ID NO: 25308 - RNA, 20 nt, Artificial Sequence
  targeting sequence with TTCN PAM
uccagccccacggggacaca

SEQ ID NO: 25309 - RNA, 20 nt, Artificial Sequence
  targeting sequence with TTCN PAM
cauuccugcaugugaacgac

SEQ ID NO: 25310 - RNA, 20 nt, Artificial Sequence
  targeting sequence with TTCN PAM
ugcaugugaacgacgcccuc

SEQ ID NO: 25311 - RNA, 20 nt, Artificial Sequence
  targeting sequence with TTCN PAM
caugcaggaaugagaaccau

SEQ ID NO: 25312 - RNA, 20 nt, Artificial Sequence
  targeting sequence with TTCN PAM
cagacguccagucauggguc

SEQ ID NO: 25313 - RNA, 20 nt, Artificial Sequence
  targeting sequence with TTCN PAM
cgggcccagacccaugacug

SEQ ID NO: 25314 - RNA, 20 nt, Artificial Sequence
  targeting sequence with TTCN PAM
gcuggacagaggccucagug

SEQ ID NO: 25315 - RNA, 20 nt, Artificial Sequence
  targeting sequence with TTCN PAM
cuggcugccaucuccaggcg

SEQ ID NO: 25316 - RNA, 20 nt, Artificial Sequence
  targeting sequence with TTCN PAM
aauccaggaccagggccuca

SEQ ID NO: 25317 - RNA, 20 nt, Artificial Sequence
  targeting sequence with TTCN PAM
cgguaggguuauugugaggu

SEQ ID NO: 25318 - RNA, 20 nt, Artificial Sequence
  targeting sequence with TTCN PAM
cuaccuguaaauagguaugu

SEQ ID NO: 25319 - RNA, 20 nt, Artificial Sequence
  targeting sequence with TTCN PAM
ccugccucagccucccgagu

SEQ ID NO: 25320 - RNA, 20 nt, Artificial Sequence
  targeting sequence with TTCN PAM
uaaugaacuugagucuccau

SEQ ID NO: 25321 - RNA, 20 nt, Artificial Sequence
  targeting sequence with TTCN PAM
uuaagaacaggacucaggcc

SEQ ID NO: 25322 - RNA, 20 nt, Artificial Sequence
  targeting sequence with TTCN PAM
ccuucucuggaaagucuuuc

SEQ ID NO: 25323 - RNA, 20 nt, Artificial Sequence
  targeting sequence with TTCN PAM
cuggaaagucuuuccuagug

SEQ ID NO: 25324 - RNA, 20 nt, Artificial Sequence
  targeting sequence with TTCN PAM
agagaaggugaaauuggguu

SEQ ID NO: 25325 - RNA, 20 nt, Artificial Sequence
  targeting sequence with TTCN PAM
uagugaacuccuaggccucc

SEQ ID NO: 25326 - RNA, 20 nt, Artificial Sequence
  targeting sequence with TTCN PAM
cuaggaaagacuuuccagag

SEQ ID NO: 25327 - RNA, 20 nt, Artificial Sequence
  targeting sequence with TTCN PAM
gagaagacuuccuugagccu

SEQ ID NO: 25328 - RNA, 20 nt, Artificial Sequence
  targeting sequence with TTCN PAM
cagaaggucuuuagacuagg

SEQ ID NO: 25329 - RNA, 20 nt, Artificial Sequence
  targeting sequence with TTCN PAM
uugagccucaaagcaguauu

SEQ ID NO: 25330 - RNA, 20 nt, Artificial Sequence
  targeting sequence with TTCN PAM
cuggccagaguccucucugc

SEQ ID NO: 25331 - RNA, 20 nt, Artificial Sequence
  targeting sequence with TTCN PAM
uccgcagagaggacucuggc

SEQ ID NO: 25332 - RNA, 20 nt, Artificial Sequence
  targeting sequence with TTCN PAM
uuagggaguuuugggugaca

SEQ ID NO: 25333 - RNA, 20 nt, Artificial Sequence
  targeting sequence with TTCN PAM
cguaaggcugcucuugagua

SEQ ID NO: 25334 - RNA, 20 nt, Artificial Sequence
  targeting sequence with TTCN PAM
ccuguggcuuccccugugac

SEQ ID NO: 25335 - RNA, 20 nt, Artificial Sequence
  targeting sequence with TTCN PAM
ccugugacuuccccacuccu

SEQ ID NO: 25336 - RNA, 20 nt, Artificial Sequence
  targeting sequence with TTCN PAM
aggcagccuucucagcucuc

SEQ ID NO: 25337 - RNA, 20 nt, Artificial Sequence
  targeting sequence with TTCN PAM
cagcucucacaggcuggguu

SEQ ID NO: 25338 - RNA, 20 nt, Artificial Sequence
  targeting sequence with TTCN PAM
uccuccucuacccccacagu

SEQ ID NO: 25339 - RNA, 20 nt, Artificial Sequence
  targeting sequence with TTCN PAM
ugaggccacugugaggaccc

SEQ ID NO: 25340 - RNA, 20 nt, Artificial Sequence
  targeting sequence with TTCN PAM
gccuugggcagcuggguggg

SEQ ID NO: 25341 - RNA, 20 nt, Artificial Sequence
  targeting sequence with TTCN PAM
ucccaccuguccagagguug

SEQ ID NO: 25342 - RNA, 20 nt, Artificial Sequence
  targeting sequence with TTCN PAM
agcucccagaaguaggaagu

SEQ ID NO: 25343 - RNA, 20 nt, Artificial Sequence
  targeting sequence with TTCN PAM
gggagcuggaaauagccucc

SEQ ID NO: 25344 - RNA, 20 nt, Artificial Sequence
  targeting sequence with TTCN PAM
uacuucugggagcuggaaau

SEQ ID NO: 25345 - RNA, 20 nt, Artificial Sequence
  targeting sequence with TTCN PAM
gacucacuuccuacuucugg

SEQ ID NO: 25346 - RNA, 20 nt, Artificial Sequence
  targeting sequence with TTCN PAM
gugcaggucucagccgucuc

SEQ ID NO: 25347 - RNA, 20 nt, Artificial Sequence
  targeting sequence with TTCN PAM
ugccacccuggguggugguc

SEQ ID NO: 25348 - RNA, 20 nt, Artificial Sequence
  targeting sequence with TTCN PAM
ucuaggccuccuuccugcca

SEQ ID NO: 25349 - RNA, 20 nt, Artificial Sequence
  targeting sequence with TTCN PAM
cuccuauccucuuccucuag

SEQ ID NO: 25350 - RNA, 20 nt, Artificial Sequence
  targeting sequence with TTCN PAM
gcaggggccccacagggcug

SEQ ID NO: 25351 - RNA, 20 nt, Artificial Sequence
  targeting sequence with TTCN PAM
ucagcacagaugcagccacc

SEQ ID NO: 25352 - RNA, 20 nt, Artificial Sequence
  targeting sequence with TTCN PAM
uggugggccccagguguggc

SEQ ID NO: 25353 - RNA, 20 nt, Artificial Sequence
  targeting sequence with TTCN PAM
ccauccucacucgagaggcu

SEQ ID NO: 25354 - RNA, 20 nt, Artificial Sequence
  targeting sequence with TTCN PAM
cagcucuggcaccaaaaggg

SEQ ID NO: 25355 - RNA, 20 nt, Artificial Sequence
  targeting sequence with TTCN PAM
aaacuggcugggugcagugg

SEQ ID NO: 25356 - RNA, 20 nt, Artificial Sequence
  targeting sequence with TTCN PAM
uuuuuugugucugaauuuuc

SEQ ID NO: 25357 - RNA, 20 nt, Artificial Sequence
  targeting sequence with TTCN PAM
gacacaaaaaaagaaaaacu

SEQ ID NO: 25358 - RNA, 20 nt, Artificial Sequence
  targeting sequence with TTCN PAM
aaguuuuccucaaagaauau

SEQ ID NO: 25359 - RNA, 20 nt, Artificial Sequence
  targeting sequence with TTCN PAM
ucaaagaauauguauuauuu

SEQ ID NO: 25360 - RNA, 20 nt, Artificial Sequence
  targeting sequence with TTCN PAM
uugaggaaaacuuagaaaau

SEQ ID NO: 25361 - RNA, 20 nt, Artificial Sequence
  targeting sequence with TTCN PAM
guuaaaaaaaacauggaggc

SEQ ID NO: 25362 - RNA, 20 nt, Artificial Sequence
  targeting sequence with TTCN PAM
gccuccauguuuuuuuuaac

SEQ ID NO: 25363 - RNA, 20 nt, Artificial Sequence
  targeting sequence with TTCN PAM
gaccugcuguaaauuacacg

SEQ ID NO: 25364 - RNA, 20 nt, Artificial Sequence
  targeting sequence with TTCN PAM
cuuccauuugugugacccca

SEQ ID NO: 25365 - RNA, 20 nt, Artificial Sequence
  targeting sequence with TTCN PAM
auuugugugaccccaggccc

SEQ ID NO: 25366 - RNA, 20 nt, Artificial Sequence
  targeting sequence with TTCN PAM
cccagcauccuccccaaggg

SEQ ID NO: 25367 - RNA, 20 nt, Artificial Sequence
  targeting sequence with TTCN PAM
gcaccgggaguugaauggug

SEQ ID NO: 25368 - RNA, 20 nt, Artificial Sequence
  targeting sequence with TTCN PAM
ugcccuugcuaagcaaaggc

SEQ ID NO: 25369 - RNA, 20 nt, Artificial Sequence
  targeting sequence with TTCN PAM
cugauacauggggauaacag

SEQ ID NO: 25370 - RNA, 20 nt, Artificial Sequence
  targeting sequence with TTCN PAM
uucucugauacauggggaua

SEQ ID NO: 25371 - RNA, 20 nt, Artificial Sequence
  targeting sequence with TTCN PAM
ggcuguguggccuugggcag

SEQ ID NO: 25372 - RNA, 20 nt, Artificial Sequence
  targeting sequence with TTCN PAM
gugccacugucccccacccc

SEQ ID NO: 25373 - RNA, 20 nt, Artificial Sequence
  targeting sequence with TTCN PAM
ccgcaucugcaccucccacc

SEQ ID NO: 25374 - RNA, 20 nt, Artificial Sequence
  targeting sequence with TTCN PAM
augcucggcucagcugucca

SEQ ID NO: 25375 - RNA, 20 nt, Artificial Sequence
  targeting sequence with TTCN PAM
gcccggugcugggugcuggc

SEQ ID NO: 25376 - RNA, 20 nt, Artificial Sequence
  targeting sequence with TTCN PAM
ccugugcacugggcauacug

SEQ ID NO: 25377 - RNA, 20 nt, Artificial Sequence
  targeting sequence with TTCN PAM
aucuuccccugugcacuggg

SEQ ID NO: 25378 - RNA, 20 nt, Artificial Sequence
  targeting sequence with TTCN PAM
ugagagcaagaagaggccac

SEQ ID NO: 25379 - RNA, 20 nt, Artificial Sequence
  targeting sequence with TTCN PAM
ugcucucaugaaguugcauu

SEQ ID NO: 25380 - RNA, 20 nt, Artificial Sequence
  targeting sequence with TTCN PAM
uggaggaggugaugccuaac

SEQ ID NO: 25381 - RNA, 20 nt, Artificial Sequence
  targeting sequence with TTCN PAM
ggcagggagaggaggaaaca

SEQ ID NO: 25382 - RNA, 20 nt, Artificial Sequence
  targeting sequence with TTCN PAM
uccucucccugccugaacua

SEQ ID NO: 25383 - RNA, 20 nt, Artificial Sequence
  targeting sequence with TTCN PAM
ugccucugggucuuugcaca

SEQ ID NO: 25384 - RNA, 20 nt, Artificial Sequence
  targeting sequence with TTCN PAM
cuacugcuggcccugccuug

SEQ ID NO: 25385 - RNA, 20 nt, Artificial Sequence
  targeting sequence with TTCN PAM
ggucugcagaggagccggca

SEQ ID NO: 25386 - RNA, 20 nt, Artificial Sequence
  targeting sequence with TTCN PAM
accucgccuuccggucugca

SEQ ID NO: 25387 - RNA, 20 nt, Artificial Sequence
  targeting sequence with TTCN PAM
uugagagcugugggacugga

SEQ ID NO: 25388 - RNA, 20 nt, Artificial Sequence
  targeting sequence with TTCN PAM
cuucauugagagcuguggga

SEQ ID NO: 25389 - RNA, 20 nt, Artificial Sequence
  targeting sequence with TTCN PAM
aagcaguuucucuucauuga

SEQ ID NO: 25390 - RNA, 20 nt, Artificial Sequence
  targeting sequence with TTCN PAM
uuccaagcaguuucucuuca

SEQ ID NO: 25391 - RNA, 20 nt, Artificial Sequence
  targeting sequence with TTCN PAM
uugucuccacucccagaucc

SEQ ID NO: 25392 - RNA, 20 nt, Artificial Sequence
  targeting sequence with TTCN PAM
ggcaggaucugggaguggag

SEQ ID NO: 25393 - RNA, 20 nt, Artificial Sequence
  targeting sequence with TTCN PAM
aggagggggauugaacggug

SEQ ID NO: 25394 - RNA, 20 nt, Artificial Sequence
  targeting sequence with TTCN PAM
aucccccuccuugaaagccu

SEQ ID NO: 25395 - RNA, 20 nt, Artificial Sequence
  targeting sequence with TTCN PAM
ccaccgcccacggggguccg

SEQ ID NO: 25396 - RNA, 20 nt, Artificial Sequence
  targeting sequence with TTCN PAM
cugggugguggagugggcaa

SEQ ID NO: 25397 - RNA, 20 nt, Artificial Sequence
  targeting sequence with TTCN PAM
cuaauaacuucaguuaguuc

SEQ ID NO: 25398 - RNA, 20 nt, Artificial Sequence
  targeting sequence with TTCN PAM
guuaguucccugccagcccu

SEQ ID NO: 25399 - RNA, 20 nt, Artificial Sequence
  targeting sequence with TTCN PAM
cugccagcccuggaggcagg

SEQ ID NO: 25400 - RNA, 20 nt, Artificial Sequence
  targeting sequence with TTCN PAM
caggcaucaaagggugugcc

SEQ ID NO: 25401 - RNA, 20 nt, Artificial Sequence
  targeting sequence with TTCN PAM
caucccagcucugcugugug

SEQ ID NO: 25402 - RNA, 20 nt, Artificial Sequence
  targeting sequence with TTCN PAM
ggccccagagcccacuagcu

SEQ ID NO: 25403 - RNA, 20 nt, Artificial Sequence
  targeting sequence with TTCN PAM
uuaacugccccuagagcccu

SEQ ID NO: 25404 - RNA, 20 nt, Artificial Sequence
  targeting sequence with TTCN PAM
ucuucauuaacugccccuag

SEQ ID NO: 25405 - RNA, 20 nt, Artificial Sequence
  targeting sequence with TTCN PAM
cccgccccacacaugcagcu

SEQ ID NO: 25406 - RNA, 20 nt, Artificial Sequence
  targeting sequence with TTCN PAM
agggacagggagcucacucc

SEQ ID NO: 25407 - RNA, 20 nt, Artificial Sequence
  targeting sequence with TTCN PAM
agcaaggggacauaugugug

SEQ ID NO: 25408 - RNA, 20 nt, Artificial Sequence
  targeting sequence with TTCN PAM
uaaucacugaccgggagacc

SEQ ID NO: 25409 - RNA, 20 nt, Artificial Sequence
  targeting sequence with TTCN PAM
agagccuccuggucucccgg

SEQ ID NO: 25410 - RNA, 20 nt, Artificial Sequence
  targeting sequence with TTCN PAM
ccuccaguccugccccacca

SEQ ID NO: 25411 - RNA, 20 nt, Artificial Sequence
  targeting sequence with TTCN PAM
auggucuucaccuccagucc

SEQ ID NO: 25412 - RNA, 20 nt, Artificial Sequence
  targeting sequence with TTCN PAM
uagaaagaagcuuccggcuc

SEQ ID NO: 25413 - RNA, 20 nt, Artificial Sequence
  targeting sequence with TTCN PAM
aggaaaggcugagguugugg

SEQ ID NO: 25414 - RNA, 20 nt, Artificial Sequence
  targeting sequence with TTCN PAM
uucuaggaaaggcugagguu

SEQ ID NO: 25415 - RNA, 20 nt, Artificial Sequence
  targeting sequence with TTCN PAM
ggcuccugcucagccugggu

SEQ ID NO: 25416 - RNA, 20 nt, Artificial Sequence
  targeting sequence with TTCN PAM
uccccacccaggcugagcag

SEQ ID NO: 25417 - RNA, 20 nt, Artificial Sequence
  targeting sequence with TTCN PAM
cacgguggcccccaucaaug

SEQ ID NO: 25418 - RNA, 20 nt, Artificial Sequence
  targeting sequence with TTCN PAM
uggauacugaucucagaugg

SEQ ID NO: 25419 - RNA, 20 nt, Artificial Sequence
  targeting sequence with TTCN PAM
caguccccauagugcugucg

SEQ ID NO: 25420 - RNA, 20 nt, Artificial Sequence
  targeting sequence with TTCN PAM
cccuccugucuucacagucc

SEQ ID NO: 25421 - RNA, 20 nt, Artificial Sequence
  targeting sequence with TTCN PAM
ccuucucccuccugucuuca

SEQ ID NO: 25422 - RNA, 20 nt, Artificial Sequence
  targeting sequence with TTCN PAM
ccuuccccuucucccuccug

SEQ ID NO: 25423 - RNA, 20 nt, Artificial Sequence
  targeting sequence with TTCN PAM
cuccuguggccguccuguuc

SEQ ID NO: 25424 - RNA, 20 nt, Artificial Sequence
  targeting sequence with TTCN PAM
agcacuaaggugcccugggg

SEQ ID NO: 25425 - RNA, 20 nt, Artificial Sequence
  targeting sequence with TTCN PAM
auugccccacaguccuccag

SEQ ID NO: 25426 - RNA, 20 nt, Artificial Sequence
  targeting sequence with TTCN PAM
acuucccuccaggguugacc

SEQ ID NO: 25427 - RNA, 20 nt, Artificial Sequence
  targeting sequence with TTCN PAM
cuccaggguugaccucagca

SEQ ID NO: 25428 - RNA, 20 nt, Artificial Sequence
  targeting sequence with TTCN PAM
cagagccaaggccggaagca

SEQ ID NO: 25429 - RNA, 20 nt, Artificial Sequence
  targeting sequence with TTCN PAM
ggccuuggcucugggaaaag

SEQ ID NO: 25430 - RNA, 20 nt, Artificial Sequence
  targeting sequence with TTCN PAM
ggcugggcuggggcuccggg

SEQ ID NO: 25431 - RNA, 20 nt, Artificial Sequence
  targeting sequence with TTCN PAM
gccucgccagcccggagccc

SEQ ID NO: 25432 - RNA, 20 nt, Artificial Sequence
  targeting sequence with TTCN PAM
ucccggugggggagccugac

SEQ ID NO: 25433 - RNA, 20 nt, Artificial Sequence
  targeting sequence with TTCN PAM
uccuuccucccgguggggga

SEQ ID NO: 25434 - RNA, 20 nt, Artificial Sequence
  targeting sequence with TTCN PAM
uccuuccuccuuccucccgg

SEQ ID NO: 25435 - RNA, 20 nt, Artificial Sequence
  targeting sequence with TTCN PAM
caccuccagccuugccuucc

SEQ ID NO: 25436 - RNA, 20 nt, Artificial Sequence
  targeting sequence with TTCN PAM
ucacccccagaggcugggcu

SEQ ID NO: 25437 - RNA, 20 nt, Artificial Sequence
  targeting sequence with TTCN PAM
ucagccacugagcgccuacu

SEQ ID NO: 25438 - RNA, 20 nt, Artificial Sequence
  targeting sequence with TTCN PAM
cucagccggggcucaggccc

SEQ ID NO: 25439 - RNA, 20 nt, Artificial Sequence
  targeting sequence with TTCN PAM
uucugucuuaguccaaacug

SEQ ID NO: 25440 - RNA, 20 nt, Artificial Sequence
  targeting sequence with TTCN PAM
gucuuaguccaaacugugug

SEQ ID NO: 25441 - RNA, 20 nt, Artificial Sequence
  targeting sequence with TTCN PAM
aauguugaaacccccaauac

SEQ ID NO: 25442 - RNA, 20 nt, Artificial Sequence
  targeting sequence with TTCN PAM
acauuugaauuugucggggg

SEQ ID NO: 25443 - RNA, 20 nt, Artificial Sequence
  targeting sequence with TTCN PAM
uuaaguuaaaaugagauggu

SEQ ID NO: 25444 - RNA, 20 nt, Artificial Sequence
  targeting sequence with TTCN PAM
agaccagccuaggcaacaca

SEQ ID NO: 25445 - RNA, 20 nt, Artificial Sequence
  targeting sequence with TTCN PAM
caccucgguccucuaaguag

SEQ ID NO: 25446 - RNA, 20 nt, Artificial Sequence
  targeting sequence with TTCN PAM
ggagggugcaagugguacag

SEQ ID NO: 25447 - RNA, 20 nt, Artificial Sequence
  targeting sequence with TTCN PAM
ucucaguucuggagggugca

SEQ ID NO: 25448 - RNA, 20 nt, Artificial Sequence
  targeting sequence with TTCN PAM
guuguugagcgauccagucu

SEQ ID NO: 25449 - RNA, 20 nt, Artificial Sequence
  targeting sequence with TTCN PAM
ggaggcugcaaggccaaguc

SEQ ID NO: 25450 - RNA, 20 nt, Artificial Sequence
  targeting sequence with TTCN PAM
ggcuguguccucacaugauc

SEQ ID NO: 25451 - RNA, 20 nt, Artificial Sequence
  targeting sequence with TTCN PAM
cucacuuccugcauaucuga

SEQ ID NO: 25452 - RNA, 20 nt, Artificial Sequence
  targeting sequence with TTCN PAM
ugcauaucugaauccucagc

SEQ ID NO: 25453 - RNA, 20 nt, Artificial Sequence
  targeting sequence with TTCN PAM
gauaugcaggaagugaggga

SEQ ID NO: 25454 - RNA, 20 nt, Artificial Sequence
  targeting sequence with TTCN PAM
uuauuuuuuuuuuuuugaga

SEQ ID NO: 25455 - RNA, 20 nt, Artificial Sequence
  targeting sequence with TTCN PAM
uaggcucaagccauccucca

SEQ ID NO: 25456 - RNA, 20 nt, Artificial Sequence
  targeting sequence with TTCN PAM
cuuuggcucuccgcuccagc

SEQ ID NO: 25457 - RNA, 20 nt, Artificial Sequence
  targeting sequence with TTCN PAM
gccugucaugcccuuuccag

SEQ ID NO: 25458 - RNA, 20 nt, Artificial Sequence
  targeting sequence with TTCN PAM
agaucuccccagggcugccg

SEQ ID NO: 25459 - RNA, 20 nt, Artificial Sequence
  targeting sequence with TTCN PAM
uaucccucagguuucugcuc

SEQ ID NO: 25460 - RNA, 20 nt, Artificial Sequence
  targeting sequence with TTCN PAM
gcucaaauaucccccuccaa

SEQ ID NO: 25461 - RNA, 20 nt, Artificial Sequence
  targeting sequence with TTCN PAM
ccagggcaggggauaugucu

SEQ ID NO: 25462 - RNA, 20 nt, Artificial Sequence
  targeting sequence with TTCN PAM
gcaaaccuuuacugugcacc

SEQ ID NO: 25463 - RNA, 20 nt, Artificial Sequence
  targeting sequence with TTCN PAM
cacgcagcaccuguguucac

SEQ ID NO: 25464 - RNA, 20 nt, Artificial Sequence
  targeting sequence with TTCN PAM
ccgcccccuuccccaucugu

SEQ ID NO: 25465 - RNA, 20 nt, Artificial Sequence
  targeting sequence with TTCN PAM
ccaucugucuuccagugauu

SEQ ID NO: 25466 - RNA, 20 nt, Artificial Sequence
  targeting sequence with TTCN PAM
agugauuccuccagaggcug

SEQ ID NO: 25467 - RNA, 20 nt, Artificial Sequence
  targeting sequence with TTCN PAM
uccagaggcugcuuguuugg

SEQ ID NO: 25468 - RNA, 20 nt, Artificial Sequence
  targeting sequence with TTCN PAM
caaacaagcagccucuggag

SEQ ID NO: 25469 - RNA, 20 nt, Artificial Sequence
  targeting sequence with TTCN PAM
ucccaaacaagcagccucug

SEQ ID NO: 25470 - RNA, 20 nt, Artificial Sequence
  targeting sequence with TTCN PAM
accugguccuaccugcuuag

SEQ ID NO: 25471 - RNA, 20 nt, Artificial Sequence
  targeting sequence with TTCN PAM
uaugcucaaguccuccucag

SEQ ID NO: 25472 - RNA, 20 nt, Artificial Sequence
  targeting sequence with TTCN PAM
ccuggggacucgugggguag

SEQ ID NO: 25473 - RNA, 20 nt, Artificial Sequence
  targeting sequence with TTCN PAM
cucauccugcucccagaugg

SEQ ID NO: 25474 - RNA, 20 nt, Artificial Sequence
  targeting sequence with TTCN PAM
ugcccuucccucauccugcu

SEQ ID NO: 25475 - RNA, 20 nt, Artificial Sequence
  targeting sequence with TTCN PAM
cucuuugcucagucaacccu

SEQ ID NO: 25476 - RNA, 20 nt, Artificial Sequence
  targeting sequence with TTCN PAM
agugggaguagggcugucuc

SEQ ID NO: 25477 - RNA, 20 nt, Artificial Sequence
  targeting sequence with TTCN PAM
gucucagccuuucaaguggg

SEQ ID NO: 25478 - RNA, 20 nt, Artificial Sequence
  targeting sequence with TTCN PAM
ccccugccccuguggcucca

SEQ ID NO: 25479 - RNA, 20 nt, Artificial Sequence
  targeting sequence with TTCN PAM
cauuucaccccugccccugu

SEQ ID NO: 25480 - RNA, 20 nt, Artificial Sequence
  targeting sequence with TTCN PAM
ucaaaaaaagucaaaugugg

SEQ ID NO: 25481 - RNA, 20 nt, Artificial Sequence
  targeting sequence with TTCN PAM
aaaaaagucaaauguggcug

SEQ ID NO: 25482 - RNA, 20 nt, Artificial Sequence
  targeting sequence with TTCN PAM
ccguguuagccaggcugguc

SEQ ID NO: 25483 - RNA, 20 nt, Artificial Sequence
  targeting sequence with TTCN PAM
ccugccucagccuccugagu

SEQ ID NO: 25484 - RNA, 20 nt, Artificial Sequence
  targeting sequence with TTCN PAM
ugccauucuccugccucagc

SEQ ID NO: 25485 - RNA, 20 nt, Artificial Sequence
  targeting sequence with TTCN PAM
aauaucuagacgugggauug

SEQ ID NO: 25486 - RNA, 20 nt, Artificial Sequence
  targeting sequence with TTCN PAM
gcaaucuggaaacaagccaa

SEQ ID NO: 25487 - RNA, 20 nt, Artificial Sequence
  targeting sequence with TTCN PAM
agauugcagaaauuaucaau

SEQ ID NO: 25488 - RNA, 20 nt, Artificial Sequence
  targeting sequence with TTCN PAM
ccagcccagggacacuuggc

SEQ ID NO: 25489 - RNA, 20 nt, Artificial Sequence
  targeting sequence with TTCN PAM
auuguauggaggccuccaug

SEQ ID NO: 25490 - RNA, 20 nt, Artificial Sequence
  targeting sequence with TTCN PAM
uuccauuguauggaggccuc

SEQ ID NO: 25491 - RNA, 20 nt, Artificial Sequence
  targeting sequence with TTCN PAM
uuuucguuccauuguaugga

SEQ ID NO: 25492 - RNA, 20 nt, Artificial Sequence
  targeting sequence with TTCN PAM
agccuggcuuggagaugcau

SEQ ID NO: 25493 - RNA, 20 nt, Artificial Sequence
  targeting sequence with TTCN PAM
aaacagcauguacaugggau

SEQ ID NO: 25494 - RNA, 20 nt, Artificial Sequence
  targeting sequence with TTCN PAM
cagucagucccuccccccag

SEQ ID NO: 25495 - RNA, 20 nt, Artificial Sequence
  targeting sequence with TTCN PAM
cugguggcccuucccaguca

SEQ ID NO: 25496 - RNA, 20 nt, Artificial Sequence
  targeting sequence with TTCN PAM
gguugcugggaauguuccau

SEQ ID NO: 25497 - RNA, 20 nt, Artificial Sequence
  targeting sequence with TTCN PAM
cagcaaccagaaaauucccu

SEQ ID NO: 25498 - RNA, 20 nt, Artificial Sequence
  targeting sequence with TTCN PAM
augucuuguucagagcauuu

SEQ ID NO: 25499 - RNA, 20 nt, Artificial Sequence
  targeting sequence with TTCN PAM
gagcauuuacaggguauaaa

SEQ ID NO: 25500 - RNA, 20 nt, Artificial Sequence
  targeting sequence with TTCN PAM
cauuugagaucugaggccac

SEQ ID NO: 25501 - RNA, 20 nt, Artificial Sequence
  targeting sequence with TTCN PAM
ccugauguaaauuauaacuc

SEQ ID NO: 25502 - RNA, 20 nt, Artificial Sequence
  targeting sequence with TTCN PAM
uugaguuauaauuuacauca

SEQ ID NO: 25503 - RNA, 20 nt, Artificial Sequence
  targeting sequence with TTCN PAM
auacucgccagccugugcca

SEQ ID NO: 25504 - RNA, 20 nt, Artificial Sequence
  targeting sequence with TTCN PAM
uagccuggggacagagcugg

SEQ ID NO: 25505 - RNA, 20 nt, Artificial Sequence
  targeting sequence with TTCN PAM
gaccggcaggggugggaggg

SEQ ID NO: 25506 - RNA, 20 nt, Artificial Sequence
  targeting sequence with TTCN PAM
cagcaccccagccugggccc

SEQ ID NO: 25507 - RNA, 20 nt, Artificial Sequence
  targeting sequence with TTCN PAM
ggccucucucugcggggcgg

SEQ ID NO: 25508 - RNA, 20 nt, Artificial Sequence
  targeting sequence with TTCN PAM
guuccggcuccgccucgucc

SEQ ID NO: 25509 - RNA, 20 nt, Artificial Sequence
  targeting sequence with TTCN PAM
ggcuccgccucguccucccg

SEQ ID NO: 25510 - RNA, 20 nt, Artificial Sequence
  targeting sequence with TTCN PAM
ccggcugcggguacaccccc

SEQ ID NO: 25511 - RNA, 20 nt, Artificial Sequence
  targeting sequence with TTCN PAM
cgagccccccgggcccucgc

SEQ ID NO: 25512 - RNA, 20 nt, Artificial Sequence
  targeting sequence with TTCN PAM
ggguggagcagcgagggccc

SEQ ID NO: 25513 - RNA, 20 nt, Artificial Sequence
  targeting sequence with TTCN PAM
cuggccgggcaucacuugcg

SEQ ID NO: 25514 - RNA, 20 nt, Artificial Sequence
  targeting sequence with TTCN PAM
cccccuugggcccuugagcg

SEQ ID NO: 25515 - RNA, 20 nt, Artificial Sequence
  targeting sequence with TTCN PAM
aagacgcucaagggcccaag

SEQ ID NO: 25516 - RNA, 20 nt, Artificial Sequence
  targeting sequence with TTCN PAM
uuuaguccccagcuuugcuc

SEQ ID NO: 25517 - RNA, 20 nt, Artificial Sequence
  targeting sequence with TTCN PAM
ugcucucgccaaauuggccg

SEQ ID NO: 25518 - RNA, 20 nt, Artificial Sequence
  targeting sequence with TTCN PAM
cgguguguccucagugccug

SEQ ID NO: 25519 - RNA, 20 nt, Artificial Sequence
  targeting sequence with TTCN PAM
ggacagggcccugaggacag

SEQ ID NO: 25520 - RNA, 20 nt, Artificial Sequence
  targeting sequence with TTCN PAM
uugccgcggacucgaggcug

SEQ ID NO: 25521 - RNA, 20 nt, Artificial Sequence
  targeting sequence with TTCN PAM
uucauugccgcggacucgag

SEQ ID NO: 25522 - RNA, 20 nt, Artificial Sequence
  targeting sequence with TTCN PAM
auugcacagauggggaggcg

SEQ ID NO: 25523 - RNA, 20 nt, Artificial Sequence
  targeting sequence with TTCN PAM
ccuccccaucugugcaauug

SEQ ID NO: 25524 - RNA, 20 nt, Artificial Sequence
  targeting sequence with TTCN PAM
ugccggcgcauagccuccca

SEQ ID NO: 25525 - RNA, 20 nt, Artificial Sequence
  targeting sequence with TTCN PAM
uggauuugagucucaacucc

SEQ ID NO: 25526 - RNA, 20 nt, Artificial Sequence
  targeting sequence with TTCN PAM
uucuuggauuugagucucaa

SEQ ID NO: 25527 - RNA, 20 nt, Artificial Sequence
  targeting sequence with TTCN PAM
caguaggcaagugguccaag

SEQ ID NO: 25528 - RNA, 20 nt, Artificial Sequence
  targeting sequence with TTCN PAM
auuuuucucaguaggcaagu

SEQ ID NO: 25529 - RNA, 20 nt, Artificial Sequence
  targeting sequence with TTCN PAM
cgacuuccauuuuucucagu

SEQ ID NO: 25530 - RNA, 20 nt, Artificial Sequence
  targeting sequence with TTCN PAM
gucuccgggccucagcuucc

SEQ ID NO: 25531 - RNA, 20 nt, Artificial Sequence
  targeting sequence with TTCN PAM
cagguuguagaaagcaucag

SEQ ID NO: 25532 - RNA, 20 nt, Artificial Sequence
  targeting sequence with TTCN PAM
acaaccugggaagcugaggc

SEQ ID NO: 25533 - RNA, 20 nt, Artificial Sequence
  targeting sequence with TTCN PAM
gagccuccaacccugaugcu

SEQ ID NO: 25534 - RNA, 20 nt, Artificial Sequence
  targeting sequence with TTCN PAM
ggcuccucucaagccaagau

SEQ ID NO: 25535 - RNA, 20 nt, Artificial Sequence
  targeting sequence with TTCN PAM
uuuugguugugcaagaaaug

SEQ ID NO: 25536 - RNA, 20 nt, Artificial Sequence
  targeting sequence with TTCN PAM
ugcacaaccaaaaugaaguc

SEQ ID NO: 25537 - RNA, 20 nt, Artificial Sequence
  targeting sequence with TTCN PAM
cagaggcagagggaccuaag

SEQ ID NO: 25538 - RNA, 20 nt, Artificial Sequence
  targeting sequence with TTCN PAM
agcuuaggucccucugccuc

SEQ ID NO: 25539 - RNA, 20 nt, Artificial Sequence
  targeting sequence with TTCN PAM
ugccuacgccgguuugauug

SEQ ID NO: 25540 - RNA, 20 nt, Artificial Sequence
  targeting sequence with TTCN PAM
aggagcgcacccucuguguc

SEQ ID NO: 25541 - RNA, 20 nt, Artificial Sequence
  targeting sequence with TTCN PAM
aaacaaaacguaagccuggu

SEQ ID NO: 25542 - RNA, 20 nt, Artificial Sequence
  targeting sequence with TTCN PAM
aaguaacagaaaagccguga

SEQ ID NO: 25543 - RNA, 20 nt, Artificial Sequence
  targeting sequence with TTCN PAM
guuacuuugaaauuauuuca

SEQ ID NO: 25544 - RNA, 20 nt, Artificial Sequence
  targeting sequence with TTCN PAM
cacggcuuuucuguuacuuu

SEQ ID NO: 25545 - RNA, 20 nt, Artificial Sequence
  targeting sequence with TTCN PAM
gagaacugccucccuuauua

SEQ ID NO: 25546 - RNA, 20 nt, Artificial Sequence
  targeting sequence with TTCN PAM
cggaacuauucucacggcuu

SEQ ID NO: 25547 - RNA, 20 nt, Artificial Sequence
  targeting sequence with TTCN PAM
ccaagcuuuaacauucugcu

SEQ ID NO: 25548 - RNA, 20 nt, Artificial Sequence
  targeting sequence with TTCN PAM
gcuccccagcccuugcauau

SEQ ID NO: 25549 - RNA, 20 nt, Artificial Sequence
  targeting sequence with TTCN PAM
agcccccauugcaagcaucg

SEQ ID NO: 25550 - RNA, 20 nt, Artificial Sequence
  targeting sequence with TTCN PAM
agggccaucgcgccugcaac

SEQ ID NO: 25551 - RNA, 20 nt, Artificial Sequence
  targeting sequence with TTCN PAM
ugggcaauacacauuggagg

SEQ ID NO: 25552 - RNA, 20 nt, Artificial Sequence
  targeting sequence with TTCN PAM
auugcacaaccccagugguu

SEQ ID NO: 25553 - RNA, 20 nt, Artificial Sequence
  targeting sequence with TTCN PAM
agaucgagugauuuaaccau

SEQ ID NO: 25554 - RNA, 20 nt, Artificial Sequence
  targeting sequence with TTCN PAM
cauccccauccaggagccac

SEQ ID NO: 25555 - RNA, 20 nt, Artificial Sequence
  targeting sequence with TTCN PAM
cgccauucuccugccucagc

SEQ ID NO: 25556 - RNA, 20 nt, Artificial Sequence
  targeting sequence with TTCN PAM
ccugccucagccucccgagu

SEQ ID NO: 25557 - RNA, 20 nt, Artificial Sequence
  targeting sequence with TTCN PAM
ccguguuagccagucugguc

SEQ ID NO: 25558 - RNA, 20 nt, Artificial Sequence
  targeting sequence with TTCN PAM
ccuuuuucauuuuguuauuu

SEQ ID NO: 25559 - RNA, 20 nt, Artificial Sequence
  targeting sequence with TTCN PAM
uuuuguuauuuuauuucguu

SEQ ID NO: 25560 - RNA, 20 nt, Artificial Sequence
  targeting sequence with TTCN PAM
uuuguuuguuuugagacagg

SEQ ID NO: 25561 - RNA, 20 nt, Artificial Sequence
  targeting sequence with TTCN PAM
aggcugcagugagccaugcu

SEQ ID NO: 25562 - RNA, 20 nt, Artificial Sequence
  targeting sequence with TTCN PAM
caaggaguuggugccuuuug

SEQ ID NO: 25563 - RNA, 20 nt, Artificial Sequence
  targeting sequence with TTCN PAM
ccaaagcugccuucucaagg

SEQ ID NO: 25564 - RNA, 20 nt, Artificial Sequence
  targeting sequence with TTCN PAM
uuaacuuuuacuauggaaaa

SEQ ID NO: 25565 - RNA, 20 nt, Artificial Sequence
  targeting sequence with TTCN PAM
auaguaaaaguuaaagaaau

SEQ ID NO: 25566 - RNA, 20 nt, Artificial Sequence
  targeting sequence with TTCN PAM
uuguagaggucucucuacuu

SEQ ID NO: 25567 - RNA, 20 nt, Artificial Sequence
  targeting sequence with TTCN PAM
uaaugauggauuacuaugga

SEQ ID NO: 25568 - RNA, 20 nt, Artificial Sequence
  targeting sequence with TTCN PAM
gcccaaaauccauaguaauc

SEQ ID NO: 25569 - RNA, 20 nt, Artificial Sequence
  targeting sequence with TTCN PAM
aaggaauaauuguguugcau

SEQ ID NO: 25570 - RNA, 20 nt, Artificial Sequence
  targeting sequence with TTCN PAM
uuugaauuuucugcccaaaa

SEQ ID NO: 25571 - RNA, 20 nt, Artificial Sequence
  targeting sequence with TTCN PAM
cuuugcuuauuuaugugaca

SEQ ID NO: 25572 - RNA, 20 nt, Artificial Sequence
  targeting sequence with TTCN PAM
cagugcuuaccucuauaaaa

SEQ ID NO: 25573 - RNA, 20 nt, Artificial Sequence
  targeting sequence with TTCN PAM
cauuuuuauagagguaagca

SEQ ID NO: 25574 - RNA, 20 nt, Artificial Sequence
  targeting sequence with TTCN PAM
aauuucucauuuuuauagag

SEQ ID NO: 25575 - RNA, 20 nt, Artificial Sequence
  targeting sequence with TTCN PAM
gacacgcgccacuaugcccg

SEQ ID NO: 25576 - RNA, 20 nt, Artificial Sequence
  targeting sequence with TTCN PAM
gguaaguuauuacaaauaac

SEQ ID NO: 25577 - RNA, 20 nt, Artificial Sequence
  targeting sequence with TTCN PAM
ggcaugagaauacaucauug

SEQ ID NO: 25578 - RNA, 20 nt, Artificial Sequence
  targeting sequence with TTCN PAM
caugccugaaaguaucuuau

SEQ ID NO: 25579 - RNA, 20 nt, Artificial Sequence
  targeting sequence with TTCN PAM
acugcccccacaaacuuuga

SEQ ID NO: 25580 - RNA, 20 nt, Artificial Sequence
  targeting sequence with TTCN PAM
auuccacugcccccacaaac

SEQ ID NO: 25581 - RNA, 20 nt, Artificial Sequence
  targeting sequence with TTCN PAM
aagagaaauaaacugaugua

SEQ ID NO: 25582 - RNA, 20 nt, Artificial Sequence
  targeting sequence with TTCN PAM
cuuagaaacucguauucaau

SEQ ID NO: 25583 - RNA, 20 nt, Artificial Sequence
  targeting sequence with TTCN PAM
uuuaaaaaaaggccagggcc

SEQ ID NO: 25584 - RNA, 20 nt, Artificial Sequence
  targeting sequence with TTCN PAM
agaccagccuggccaacaug

SEQ ID NO: 25585 - RNA, 20 nt, Artificial Sequence
  targeting sequence with TTCN PAM
ccauguuggccaggcugguc

SEQ ID NO: 25586 - RNA, 20 nt, Artificial Sequence
  targeting sequence with TTCN PAM
uuuuagagacaaggucucac

SEQ ID NO: 25587 - RNA, 20 nt, Artificial Sequence
  targeting sequence with TTCN PAM
uauuuauuuauucauuuuag

SEQ ID NO: 25588 - RNA, 20 nt, Artificial Sequence
  targeting sequence with TTCN PAM
ucuagguaccuguucuauuu

SEQ ID NO: 25589 - RNA, 20 nt, Artificial Sequence
  targeting sequence with TTCN PAM
auuuuuuuuuucuuugaguu

SEQ ID NO: 25590 - RNA, 20 nt, Artificial Sequence
  targeting sequence with TTCN PAM
uugaguuuuuuuaauaaaau

SEQ ID NO: 25591 - RNA, 20 nt, Artificial Sequence
  targeting sequence with TTCN PAM
aaggcuggauccuagccuug

SEQ ID NO: 25592 - RNA, 20 nt, Artificial Sequence
  targeting sequence with TTCN PAM
ccgucuucaaaugcaggccg

SEQ ID NO: 25593 - RNA, 20 nt, Artificial Sequence
  targeting sequence with TTCN PAM
gcaggggccuggagcugguc

SEQ ID NO: 25594 - RNA, 20 nt, Artificial Sequence
  targeting sequence with TTCN PAM
ccuggucaaagcccaaggcc

SEQ ID NO: 25595 - RNA, 20 nt, Artificial Sequence
  targeting sequence with TTCN PAM
acugcugccccacugucuuc

SEQ ID NO: 25596 - RNA, 20 nt, Artificial Sequence
  targeting sequence with TTCN PAM
guccacccagcuggaugaua

SEQ ID NO: 25597 - RNA, 20 nt, Artificial Sequence
  targeting sequence with TTCN PAM
ggcugccucuuuaaugcagc

SEQ ID NO: 25598 - RNA, 20 nt, Artificial Sequence
  targeting sequence with TTCN PAM
cuucuggcugccucuuuaau

SEQ ID NO: 25599 - RNA, 20 nt, Artificial Sequence
  targeting sequence with TTCN PAM
gcccaagccuggugaccuca

SEQ ID NO: 25600 - RNA, 20 nt, Artificial Sequence
  targeting sequence with TTCN PAM
ggagccuucugcccaagccu

SEQ ID NO: 25601 - RNA, 20 nt, Artificial Sequence
  targeting sequence with TTCN PAM
gguaugccucacagacaugu

SEQ ID NO: 25602 - RNA, 20 nt, Artificial Sequence
  targeting sequence with TTCN PAM
gguaaaaccagucuagcccc

SEQ ID NO: 25603 - RNA, 20 nt, Artificial Sequence
  targeting sequence with TTCN PAM
ugcucaggucuauccagacu

SEQ ID NO: 25604 - RNA, 20 nt, Artificial Sequence
  targeting sequence with TTCN PAM
caccugaccucuggcucaag

SEQ ID NO: 25605 - RNA, 20 nt, Artificial Sequence
  targeting sequence with TTCN PAM
ugugaacuacggggagugug

SEQ ID NO: 25606 - RNA, 20 nt, Artificial Sequence
  targeting sequence with TTCN PAM
caugaaacuaauucccaccu

SEQ ID NO: 25607 - RNA, 20 nt, Artificial Sequence
  targeting sequence with TTCN PAM
uuuaaaaaaaaaaaaucccu

SEQ ID NO: 25608 - RNA, 20 nt, Artificial Sequence
  targeting sequence with TTCN PAM
guucuuuuaaaaaaaaaaaa

SEQ ID NO: 25609 - RNA, 20 nt, Artificial Sequence
  targeting sequence with TTCN PAM
acuuaucaaaaaacugugaa

SEQ ID NO: 25610 - RNA, 20 nt, Artificial Sequence
  targeting sequence with TTCN PAM
caguuuuuugauaaguggaa

SEQ ID NO: 25611 - RNA, 20 nt, Artificial Sequence
  targeting sequence with TTCN PAM
ucaaacacccaacugauugg

SEQ ID NO: 25612 - RNA, 20 nt, Artificial Sequence
  targeting sequence with TTCN PAM
ggucaucccaaucaguuggg

SEQ ID NO: 25613 - RNA, 20 nt, Artificial Sequence
  targeting sequence with TTCN PAM
gguuucuucucaaagggcug

SEQ ID NO: 25614 - RNA, 20 nt, Artificial Sequence
  targeting sequence with TTCN PAM
ucucaaagggcuguaauuaa

SEQ ID NO: 25615 - RNA, 20 nt, Artificial Sequence
  targeting sequence with TTCN PAM
caaagggcuguaauuaaaca

SEQ ID NO: 25616 - RNA, 20 nt, Artificial Sequence
  targeting sequence with TTCN PAM
guuuaauuacagcccuuuga

SEQ ID NO: 25617 - RNA, 20 nt, Artificial Sequence
  targeting sequence with TTCN PAM
acaccuguaauggcuucucu

SEQ ID NO: 25618 - RNA, 20 nt, Artificial Sequence
  targeting sequence with TTCN PAM
cuuguagucacaagguaaac

SEQ ID NO: 25619 - RNA, 20 nt, Artificial Sequence
  targeting sequence with TTCN PAM
agauuucuugcaacuuggcc

SEQ ID NO: 25620 - RNA, 20 nt, Artificial Sequence
  targeting sequence with TTCN PAM
ugcaacuuggcccccacaua

SEQ ID NO: 25621 - RNA, 20 nt, Artificial Sequence
  targeting sequence with TTCN PAM
cacacauucuuucaggcacc

SEQ ID NO: 25622 - RNA, 20 nt, Artificial Sequence
  targeting sequence with TTCN PAM
uucaggcacccuaccaguca

SEQ ID NO: 25623 - RNA, 20 nt, Artificial Sequence
  targeting sequence with TTCN PAM
ggcacccuaccagucacuua

SEQ ID NO: 25624 - RNA, 20 nt, Artificial Sequence
  targeting sequence with TTCN PAM
agcaauggauaaggagccuu

SEQ ID NO: 25625 - RNA, 20 nt, Artificial Sequence
  targeting sequence with TTCN PAM
ccucugugguuuugcuaaua

SEQ ID NO: 25626 - RNA, 20 nt, Artificial Sequence
  targeting sequence with TTCN PAM
auuggagguauuagcaaaac

SEQ ID NO: 25627 - RNA, 20 nt, Artificial Sequence
  targeting sequence with TTCN PAM
gcucaucauaaagccaccau

SEQ ID NO: 25628 - RNA, 20 nt, Artificial Sequence
  targeting sequence with TTCN PAM
guccagauaccauggccucc

SEQ ID NO: 25629 - RNA, 20 nt, Artificial Sequence
  targeting sequence with TTCN PAM
cuauugcucuguuagaauug

SEQ ID NO: 25630 - RNA, 20 nt, Artificial Sequence
  targeting sequence with TTCN PAM
aacagagcaauagggaaagg

SEQ ID NO: 25631 - RNA, 20 nt, Artificial Sequence
  targeting sequence with TTCN PAM
uccucuuugcucccacacgu

SEQ ID NO: 25632 - RNA, 20 nt, Artificial Sequence
  targeting sequence with TTCN PAM
gccucuuuaccacauguauu

SEQ ID NO: 25633 - RNA, 20 nt, Artificial Sequence
  targeting sequence with TTCN PAM
uucuacuaaguuccuuuuuc

SEQ ID NO: 25634 - RNA, 20 nt, Artificial Sequence
  targeting sequence with TTCN PAM
acuaaguuccuuuuuccaca

SEQ ID NO: 25635 - RNA, 20 nt, Artificial Sequence
  targeting sequence with TTCN PAM
uuuuuccacagcccagucuu

SEQ ID NO: 25636 - RNA, 20 nt, Artificial Sequence
  targeting sequence with TTCN PAM
acagcccagucuuguauaga

SEQ ID NO: 25637 - RNA, 20 nt, Artificial Sequence
  targeting sequence with TTCN PAM
cagcccgcagggcuucuggc

SEQ ID NO: 25638 - RNA, 20 nt, Artificial Sequence
  targeting sequence with TTCN PAM
ggcagcgggacaucuaugug

SEQ ID NO: 25639 - RNA, 20 nt, Artificial Sequence
  targeting sequence with TTCN PAM
aggcuugggggucacauaga

SEQ ID NO: 25640 - RNA, 20 nt, Artificial Sequence
  targeting sequence with TTCN PAM
agcccuggauuucuaggcuu

SEQ ID NO: 25641 - RNA, 20 nt, Artificial Sequence
  targeting sequence with TTCN PAM
uccagcccuggauuucuagg

SEQ ID NO: 25642 - RNA, 20 nt, Artificial Sequence
  targeting sequence with TTCN PAM
uaaugacagaucauacuaga

SEQ ID NO: 25643 - RNA, 20 nt, Artificial Sequence
  targeting sequence with TTCN PAM
uuuuucacuucucacuggac

SEQ ID NO: 25644 - RNA, 20 nt, Artificial Sequence
  targeting sequence with TTCN PAM
cuucucacuggaccuauuuu

SEQ ID NO: 25645 - RNA, 20 nt, Artificial Sequence
  targeting sequence with TTCN PAM
cacuggaccuauuuuuaagu

SEQ ID NO: 25646 - RNA, 20 nt, Artificial Sequence
  targeting sequence with TTCN PAM
ucaaagagauucauacuuua

SEQ ID NO: 25647 - RNA, 20 nt, Artificial Sequence
  targeting sequence with TTCN PAM
aagagauucauacuuuauag

SEQ ID NO: 25648 - RNA, 20 nt, Artificial Sequence
  targeting sequence with TTCN PAM
uacuuuauagaagccaagca

SEQ ID NO: 25649 - RNA, 20 nt, Artificial Sequence
  targeting sequence with TTCN PAM
auaaaguaugaaucucuuug

SEQ ID NO: 25650 - RNA, 20 nt, Artificial Sequence
  targeting sequence with TTCN PAM
ugcuuggcuucuauaaagua

SEQ ID NO: 25651 - RNA, 20 nt, Artificial Sequence
  targeting sequence with TTCN PAM
ucccucucccuucccaaaau

SEQ ID NO: 25652 - RNA, 20 nt, Artificial Sequence
  targeting sequence with TTCN PAM
caaaauaacgggaaaguuua

SEQ ID NO: 25653 - RNA, 20 nt, Artificial Sequence
  targeting sequence with TTCN PAM
cguuauuuugggaagggaga

SEQ ID NO: 25654 - RNA, 20 nt, Artificial Sequence
  targeting sequence with TTCN PAM
caacauaaaugggagacaau

SEQ ID NO: 25655 - RNA, 20 nt, Artificial Sequence
  targeting sequence with TTCN PAM
acaguuggcuuuuuaaaucu

SEQ ID NO: 25656 - RNA, 20 nt, Artificial Sequence
  targeting sequence with TTCN PAM
gccuccuguauaaucagugc

SEQ ID NO: 25657 - RNA, 20 nt, Artificial Sequence
  targeting sequence with TTCN PAM
gguaugcuuauuggucauuu

SEQ ID NO: 25658 - RNA, 20 nt, Artificial Sequence
  targeting sequence with TTCN PAM
uuucuuuuuuuuuuuuugag

SEQ ID NO: 25659 - RNA, 20 nt, Artificial Sequence
  targeting sequence with TTCN PAM
uuuuuuuuuuuugagacaga

SEQ ID NO: 25660 - RNA, 20 nt, Artificial Sequence
  targeting sequence with TTCN PAM
uggguucacgccauucuccu

SEQ ID NO: 25661 - RNA, 20 nt, Artificial Sequence
  targeting sequence with TTCN PAM
cgccauucuccugccucagc

SEQ ID NO: 25662 - RNA, 20 nt, Artificial Sequence
  targeting sequence with TTCN PAM
ccugccucagccucccgagu

SEQ ID NO: 25663 - RNA, 20 nt, Artificial Sequence
  targeting sequence with TTCN PAM
aaagcugaaaggcagcuccu

SEQ ID NO: 25664 - RNA, 20 nt, Artificial Sequence
  targeting sequence with TTCN PAM
gcuuuggaaaauaugcaacu

SEQ ID NO: 25665 - RNA, 20 nt, Artificial Sequence
  targeting sequence with TTCN PAM
aaugaggagcugccuuucag

SEQ ID NO: 25666 - RNA, 20 nt, Artificial Sequence
  targeting sequence with TTCN PAM
gagagaguuccaaugaggag

SEQ ID NO: 25667 - RNA, 20 nt, Artificial Sequence
  targeting sequence with TTCN PAM
ucugacuguaccucaaagga

SEQ ID NO: 25668 - RNA, 20 nt, Artificial Sequence
  targeting sequence with TTCN PAM
uuugagguacagucagauga

SEQ ID NO: 25669 - RNA, 20 nt, Artificial Sequence
  targeting sequence with TTCN PAM
uguuccuuugagguacaguc

SEQ ID NO: 25670 - RNA, 20 nt, Artificial Sequence
  targeting sequence with TTCN PAM
gauuucauguuccuuugagg

SEQ ID NO: 25671 - RNA, 20 nt, Artificial Sequence
  targeting sequence with TTCN PAM
cugcauuugguuuuguuucu

SEQ ID NO: 25672 - RNA, 20 nt, Artificial Sequence
  targeting sequence with TTCN PAM
uguggucuucacugcauuug

SEQ ID NO: 25673 - RNA, 20 nt, Artificial Sequence
  targeting sequence with TTCN PAM
ucacuagccauguccaaaua

SEQ ID NO: 25674 - RNA, 20 nt, Artificial Sequence
  targeting sequence with TTCN PAM
gaacaggggagagagaagac

SEQ ID NO: 25675 - RNA, 20 nt, Artificial Sequence
  targeting sequence with TTCN PAM
gaauggaguaaaagucugau

SEQ ID NO: 25676 - RNA, 20 nt, Artificial Sequence
  targeting sequence with TTCN PAM
cucuccccuguucugaaugg

SEQ ID NO: 25677 - RNA, 20 nt, Artificial Sequence
  targeting sequence with TTCN PAM
cugacuagggucuucucucu

SEQ ID NO: 25678 - RNA, 20 nt, Artificial Sequence
  targeting sequence with TTCN PAM
uaaggagccaguagagugga

SEQ ID NO: 25679 - RNA, 20 nt, Artificial Sequence
  targeting sequence with TTCN PAM
acucuacuggcuccuuaaga

SEQ ID NO: 25680 - RNA, 20 nt, Artificial Sequence
  targeting sequence with TTCN PAM
uuacuaggacauacugagua

SEQ ID NO: 25681 - RNA, 20 nt, Artificial Sequence
  targeting sequence with TTCN PAM
uugguauacucaguaugucc

SEQ ID NO: 25682 - RNA, 20 nt, Artificial Sequence
  targeting sequence with TTCN PAM
auuccuugguauacucagua

SEQ ID NO: 25683 - RNA, 20 nt, Artificial Sequence
  targeting sequence with TTCN PAM
gucugcuccaauuuccauuc

SEQ ID NO: 25684 - RNA, 20 nt, Artificial Sequence
  targeting sequence with TTCN PAM
auuaucauaaacaauguaaa

SEQ ID NO: 25685 - RNA, 20 nt, Artificial Sequence
  targeting sequence with TTCN PAM
acaaccugaacaaucaccca

SEQ ID NO: 25686 - RNA, 20 nt, Artificial Sequence
  targeting sequence with TTCN PAM
gguuguagaaugcgcauuuu

SEQ ID NO: 25687 - RNA, 20 nt, Artificial Sequence
  targeting sequence with TTCN PAM
cucacccaggcuagaggcau

SEQ ID NO: 25688 - RNA, 20 nt, Artificial Sequence
  targeting sequence with TTCN PAM
ugguuuauuuguccaugccu

SEQ ID NO: 25689 - RNA, 20 nt, Artificial Sequence
  targeting sequence with TTCN PAM
uuuuaaagggaaugaauaca

SEQ ID NO: 25690 - RNA, 20 nt, Artificial Sequence
  targeting sequence with TTCN PAM
cuuuaaaaugaaacauuccu

SEQ ID NO: 25691 - RNA, 20 nt, Artificial Sequence
  targeting sequence with TTCN PAM
uucccuuuaaaaugaaacau

SEQ ID NO: 25692 - RNA, 20 nt, Artificial Sequence
  targeting sequence with TTCN PAM
uuucuuuuuuuuuuagagga

SEQ ID NO: 25693 - RNA, 20 nt, Artificial Sequence
  targeting sequence with TTCN PAM
uuuuuuuuuagaggagcauu

SEQ ID NO: 25694 - RNA, 20 nt, Artificial Sequence
  targeting sequence with TTCN PAM
aaugaggggacguuuccacc

SEQ ID NO: 25695 - RNA, 20 nt, Artificial Sequence
  targeting sequence with TTCN PAM
acccagaacaacuguuaagc

SEQ ID NO: 25696 - RNA, 20 nt, Artificial Sequence
  targeting sequence with TTCN PAM
ggguggaaacguccccucau

SEQ ID NO: 25697 - RNA, 20 nt, Artificial Sequence
  targeting sequence with TTCN PAM
auaaccucgcucuaauggcu

SEQ ID NO: 25698 - RNA, 20 nt, Artificial Sequence
  targeting sequence with TTCN PAM
uuugucuugucagagcucuu

SEQ ID NO: 25699 - RNA, 20 nt, Artificial Sequence
  targeting sequence with TTCN PAM
uggguucuuuugucuuguca

SEQ ID NO: 25700 - RNA, 20 nt, Artificial Sequence
  targeting sequence with TTCN PAM
uugugguuguucuuggguuc

SEQ ID NO: 25701 - RNA, 20 nt, Artificial Sequence
  targeting sequence with TTCN PAM
uucauugugguuguucuugg

SEQ ID NO: 25702 - RNA, 20 nt, Artificial Sequence
  targeting sequence with TTCN PAM
uugcuguaccuuuugcugcc

SEQ ID NO: 25703 - RNA, 20 nt, Artificial Sequence
  targeting sequence with TTCN PAM
uucuuugcuguaccuuuugc

SEQ ID NO: 25704 - RNA, 20 nt, Artificial Sequence
  targeting sequence with TTCN PAM
gggucuggugaauaauuaag

SEQ ID NO: 25705 - RNA, 20 nt, Artificial Sequence
  targeting sequence with TTCN PAM
ccagacccagaaguuguacg

SEQ ID NO: 25706 - RNA, 20 nt, Artificial Sequence
  targeting sequence with TTCN PAM
ugucccuuaauuauucacca

SEQ ID NO: 25707 - RNA, 20 nt, Artificial Sequence
  targeting sequence with TTCN PAM
gugcagaucaggugcaguaa

SEQ ID NO: 25708 - RNA, 20 nt, Artificial Sequence
  targeting sequence with TTCN PAM
uaagacaguuugagaaagga

SEQ ID NO: 25709 - RNA, 20 nt, Artificial Sequence
  targeting sequence with TTCN PAM
caaacugucuuaggaaggac

SEQ ID NO: 25710 - RNA, 20 nt, Artificial Sequence
  targeting sequence with TTCN PAM
uuucucaaacugucuuagga

SEQ ID NO: 25711 - RNA, 20 nt, Artificial Sequence
  targeting sequence with TTCN PAM
aucuuccuuucucaaacugu

SEQ ID NO: 25712 - RNA, 20 nt, Artificial Sequence
  targeting sequence with TTCN PAM
acaggugaaaaccuuccuuu

SEQ ID NO: 25713 - RNA, 20 nt, Artificial Sequence
  targeting sequence with TTCN PAM
ccuguagaaagcccccugcc

SEQ ID NO: 25714 - RNA, 20 nt, Artificial Sequence
  targeting sequence with TTCN PAM
uuugauagauagaaaccguc

SEQ ID NO: 25715 - RNA, 20 nt, Artificial Sequence
  targeting sequence with TTCN PAM
aucuaucaaaggaagguuuu

SEQ ID NO: 25716 - RNA, 20 nt, Artificial Sequence
  targeting sequence with TTCN PAM
uauuugcccugggacgguuu

SEQ ID NO: 25717 - RNA, 20 nt, Artificial Sequence
  targeting sequence with TTCN PAM
auccaucuaucaaagugacu

SEQ ID NO: 25718 - RNA, 20 nt, Artificial Sequence
  targeting sequence with TTCN PAM
agugcccacaaaacuuaagu

SEQ ID NO: 25719 - RNA, 20 nt, Artificial Sequence
  targeting sequence with TTCN PAM
ggcaguuugggggacucaaa

SEQ ID NO: 25720 - RNA, 20 nt, Artificial Sequence
  targeting sequence with TTCN PAM
agcuuagaaaaacuggugga

SEQ ID NO: 25721 - RNA, 20 nt, Artificial Sequence
  targeting sequence with TTCN PAM
aagcuagaaccuuugagucc

SEQ ID NO: 25722 - RNA, 20 nt, Artificial Sequence
  targeting sequence with TTCN PAM
gcuuuagcguaauugcucag

SEQ ID NO: 25723 - RNA, 20 nt, Artificial Sequence
  targeting sequence with TTCN PAM
ccuaacuuucugcuuuagcg

SEQ ID NO: 25724 - RNA, 20 nt, Artificial Sequence
  targeting sequence with TTCN PAM
aaaaguucauaguguccuuu

SEQ ID NO: 25725 - RNA, 20 nt, Artificial Sequence
  targeting sequence with TTCN PAM
uaguguccuuuggcacuccu

SEQ ID NO: 25726 - RNA, 20 nt, Artificial Sequence
  targeting sequence with TTCN PAM
ugccaaaaacaaauuguccc

SEQ ID NO: 25727 - RNA, 20 nt, Artificial Sequence
  targeting sequence with TTCN PAM
uguucaugccaaaaacaaau

SEQ ID NO: 25728 - RNA, 20 nt, Artificial Sequence
  targeting sequence with TTCN PAM
aauuuuuuuuuuuuuaaaga

SEQ ID NO: 25729 - RNA, 20 nt, Artificial Sequence
  targeting sequence with TTCN PAM
uuaaaaaaaaaaaaauuaga

SEQ ID NO: 25730 - RNA, 20 nt, Artificial Sequence
  targeting sequence with TTCN PAM
ccccaaccucagcugauugu

SEQ ID NO: 25731 - RNA, 20 nt, Artificial Sequence
  targeting sequence with TTCN PAM
auaacuacuuugauauuuua

SEQ ID NO: 25732 - RNA, 20 nt, Artificial Sequence
  targeting sequence with TTCN PAM
cagagccagcauguuguuuc

SEQ ID NO: 25733 - RNA, 20 nt, Artificial Sequence
  targeting sequence with TTCN PAM
gacaggcagggcaaugcuaa

SEQ ID NO: 25734 - RNA, 20 nt, Artificial Sequence
  targeting sequence with TTCN PAM
gaaggaauuuccugguaagu

SEQ ID NO: 25735 - RNA, 20 nt, Artificial Sequence
  targeting sequence with TTCN PAM
gaacuagauuagcauugccc

SEQ ID NO: 25736 - RNA, 20 nt, Artificial Sequence
  targeting sequence with TTCN PAM
uucagaacuagauuagcauu

SEQ ID NO: 25737 - RNA, 20 nt, Artificial Sequence
  targeting sequence with TTCN PAM
ugguaaguggaaacaggcaa

SEQ ID NO: 25738 - RNA, 20 nt, Artificial Sequence
  targeting sequence with TTCN PAM
acuuaccaggaaauuccuuc

SEQ ID NO: 25739 - RNA, 20 nt, Artificial Sequence
  targeting sequence with TTCN PAM
gggcaucuuauaugcacuug

SEQ ID NO: 25740 - RNA, 20 nt, Artificial Sequence
  targeting sequence with TTCN PAM
gugcaaccaagugcauauaa

SEQ ID NO: 25741 - RNA, 20 nt, Artificial Sequence
  targeting sequence with TTCN PAM
cucuuagccucauucugugc

SEQ ID NO: 25742 - RNA, 20 nt, Artificial Sequence
  targeting sequence with TTCN PAM
auauuauuuguaguauuggu

SEQ ID NO: 25743 - RNA, 20 nt, Artificial Sequence
  targeting sequence with TTCN PAM
aguuccaccaggaugaugga

SEQ ID NO: 25744 - RNA, 20 nt, Artificial Sequence
  targeting sequence with TTCN PAM
accaggaugauggaacuggu

SEQ ID NO: 25745 - RNA, 20 nt, Artificial Sequence
  targeting sequence with TTCN PAM
aucauccugguggaacuuga

SEQ ID NO: 25746 - RNA, 20 nt, Artificial Sequence
  targeting sequence with TTCN PAM
cccgucgcauaaccaguucc

SEQ ID NO: 25747 - RNA, 20 nt, Artificial Sequence
  targeting sequence with TTCN PAM
uuuuucaaaaccaucuauag

SEQ ID NO: 25748 - RNA, 20 nt, Artificial Sequence
  targeting sequence with TTCN PAM
aaaccaucuauagaagucca

SEQ ID NO: 25749 - RNA, 20 nt, Artificial Sequence
  targeting sequence with TTCN PAM
auagaugguuuugaaaaaug

SEQ ID NO: 25750 - RNA, 20 nt, Artificial Sequence
  targeting sequence with TTCN PAM
uauaauguaaacggacuugu

SEQ ID NO: 25751 - RNA, 20 nt, Artificial Sequence
  targeting sequence with TTCN PAM
cacccaaaacuuggguccug

SEQ ID NO: 25752 - RNA, 20 nt, Artificial Sequence
  targeting sequence with TTCN PAM
uucacugcucuuuaggagaa

SEQ ID NO: 25753 - RNA, 20 nt, Artificial Sequence
  targeting sequence with TTCN PAM
cugcucuuuaggagaaucac

SEQ ID NO: 25754 - RNA, 20 nt, Artificial Sequence
  targeting sequence with TTCN PAM
ccuaaagagcagugaaggaa

SEQ ID NO: 25755 - RNA, 20 nt, Artificial Sequence
  targeting sequence with TTCN PAM
cuuaggcagacagaauaaag

SEQ ID NO: 25756 - RNA, 20 nt, Artificial Sequence
  targeting sequence with TTCN PAM
gucugccuaagagaaucaac

SEQ ID NO: 25757 - RNA, 20 nt, Artificial Sequence
  targeting sequence with TTCN PAM
aagcuuuauucugucugccu

SEQ ID NO: 25758 - RNA, 20 nt, Artificial Sequence
  targeting sequence with TTCN PAM
uaauuucaaagcuuuauucu

SEQ ID NO: 25759 - RNA, 20 nt, Artificial Sequence
  targeting sequence with TTCN PAM
uuuuggccccagcauucuua

SEQ ID NO: 25760 - RNA, 20 nt, Artificial Sequence
  targeting sequence with TTCN PAM
gucuucauuuuggccccagc

SEQ ID NO: 25761 - RNA, 20 nt, Artificial Sequence
  targeting sequence with TTCN PAM
uuaauuuauuuuguuaacac

SEQ ID NO: 25762 - RNA, 20 nt, Artificial Sequence
  targeting sequence with TTCN PAM
uaaagacaaccccagcccaa

SEQ ID NO: 25763 - RNA, 20 nt, Artificial Sequence
  targeting sequence with TTCN PAM
cccagugaucuugggcuggg

SEQ ID NO: 25764 - RNA, 20 nt, Artificial Sequence
  targeting sequence with TTCN PAM
uggggcaaaaaaaaaaaaaa

SEQ ID NO: 25765 - RNA, 20 nt, Artificial Sequence
  targeting sequence with TTCN PAM
aaaaaccaguguaguaggau

SEQ ID NO: 25766 - RNA, 20 nt, Artificial Sequence
  targeting sequence with TTCN PAM
ucuucaacuaagccaaaccc

SEQ ID NO: 25767 - RNA, 20 nt, Artificial Sequence
  targeting sequence with TTCN PAM
acuaagccaaacccauaaaa

SEQ ID NO: 25768 - RNA, 20 nt, Artificial Sequence
  targeting sequence with TTCN PAM
uacucaaacuguuucaagac

SEQ ID NO: 25769 - RNA, 20 nt, Artificial Sequence
  targeting sequence with TTCN PAM
agacaagagggagcagcaca

SEQ ID NO: 25770 - RNA, 20 nt, Artificial Sequence
  targeting sequence with TTCN PAM
ucauuuaaaaacaucacuuc

SEQ ID NO: 25771 - RNA, 20 nt, Artificial Sequence
  targeting sequence with TTCN PAM
uuuaaaaacaucacuucuuu

SEQ ID NO: 25772 - RNA, 20 nt, Artificial Sequence
  targeting sequence with TTCN PAM
uuauuucaaaggaaaaauaa

SEQ ID NO: 25773 - RNA, 20 nt, Artificial Sequence
  targeting sequence with TTCN PAM
aaggaaaaauaaaagacccu

SEQ ID NO: 25774 - RNA, 20 nt, Artificial Sequence
  targeting sequence with TTCN PAM
uuugaaauaaagaagugaug

SEQ ID NO: 25775 - RNA, 20 nt, Artificial Sequence
  targeting sequence with TTCN PAM
aauaggauuuuuuauuauug

SEQ ID NO: 25776 - RNA, 20 nt, Artificial Sequence
  targeting sequence with TTCN PAM
uuaugguuucuaauaggauu

SEQ ID NO: 25777 - RNA, 20 nt, Artificial Sequence
  targeting sequence with TTCN PAM
ucaaguaugcuguucggauu

SEQ ID NO: 25778 - RNA, 20 nt, Artificial Sequence
  targeting sequence with TTCN PAM
aguaugcuguucggauuuuu

SEQ ID NO: 25779 - RNA, 20 nt, Artificial Sequence
  targeting sequence with TTCN PAM
gauuuuuuauuuuuagguug

SEQ ID NO: 25780 - RNA, 20 nt, Artificial Sequence
  targeting sequence with TTCN PAM
cuuuuguauccucgucaagg

SEQ ID NO: 25781 - RNA, 20 nt, Artificial Sequence
  targeting sequence with TTCN PAM
aaagugaucauacuuccagg

SEQ ID NO: 25782 - RNA, 20 nt, Artificial Sequence
  targeting sequence with TTCN PAM
aggauuagcguaaguggcca

SEQ ID NO: 25783 - RNA, 20 nt, Artificial Sequence
  targeting sequence with TTCN PAM
cacccaaguuggccacuuac

SEQ ID NO: 25784 - RNA, 20 nt, Artificial Sequence
  targeting sequence with TTCN PAM
uccacggacaacgaaaaucc

SEQ ID NO: 25785 - RNA, 20 nt, Artificial Sequence
  targeting sequence with TTCN PAM
acggacaacgaaaauccacc

SEQ ID NO: 25786 - RNA, 20 nt, Artificial Sequence
  targeting sequence with TTCN PAM
uuguccguggaagaacacau

SEQ ID NO: 25787 - RNA, 20 nt, Artificial Sequence
  targeting sequence with TTCN PAM
ggguggauuuucguuguccg

SEQ ID NO: 25788 - RNA, 20 nt, Artificial Sequence
  targeting sequence with TTCN PAM
gacauggaaugugguaggau

SEQ ID NO: 25789 - RNA, 20 nt, Artificial Sequence
  targeting sequence with TTCN PAM
augucugaauuuuuggauuc

SEQ ID NO: 25790 - RNA, 20 nt, Artificial Sequence
  targeting sequence with TTCN PAM
caguaaaguuagucugggau

SEQ ID NO: 25791 - RNA, 20 nt, Artificial Sequence
  targeting sequence with TTCN PAM
caucuuuuuaguggguuuua

SEQ ID NO: 25792 - RNA, 20 nt, Artificial Sequence
  targeting sequence with TTCN PAM
agccacaauuuagauugccc

SEQ ID NO: 25793 - RNA, 20 nt, Artificial Sequence
  targeting sequence with TTCN PAM
gugugcuccagauuguuggu

SEQ ID NO: 25794 - RNA, 20 nt, Artificial Sequence
  targeting sequence with TTCN PAM
uauuaaaggacuguuuuaag

SEQ ID NO: 25795 - RNA, 20 nt, Artificial Sequence
  targeting sequence with TTCN PAM
uugggaugcaaaucuuaaaa

SEQ ID NO: 25796 - RNA, 20 nt, Artificial Sequence
  targeting sequence with TTCN PAM
cccaaaaaacuucuuggaua

SEQ ID NO: 25797 - RNA, 20 nt, Artificial Sequence
  targeting sequence with TTCN PAM
uggauaaaaucuaaaaaaua

SEQ ID NO: 25798 - RNA, 20 nt, Artificial Sequence
  targeting sequence with TTCN PAM
agagacgcaauugcaauagu

SEQ ID NO: 25799 - RNA, 20 nt, Artificial Sequence
  targeting sequence with TTCN PAM
ucaagagacgcaauugcaau

SEQ ID NO: 25800 - RNA, 20 nt, Artificial Sequence
  targeting sequence with TTCN PAM
aaauguaaacagauucacuc

SEQ ID NO: 25801 - RNA, 20 nt, Artificial Sequence
  targeting sequence with TTCN PAM
cucaacucuuuuuuuguugu

SEQ ID NO: 25802 - RNA, 20 nt, Artificial Sequence
  targeting sequence with TTCN PAM
acaacaaaaaaagaguugag

SEQ ID NO: 25803 - RNA, 20 nt, Artificial Sequence
  targeting sequence with TTCN PAM
gaguagguaaguugcugucu

SEQ ID NO: 25804 - RNA, 20 nt, Artificial Sequence
  targeting sequence with TTCN PAM
cuacccucuggcgagugcau

SEQ ID NO: 25805 - RNA, 20 nt, Artificial Sequence
  targeting sequence with TTCN PAM
gugccagcaucaucuagggg

SEQ ID NO: 25806 - RNA, 20 nt, Artificial Sequence
  targeting sequence with TTCN PAM
uccccuagaugaugcuggca

SEQ ID NO: 25807 - RNA, 20 nt, Artificial Sequence
  targeting sequence with TTCN PAM
uuucauccccuagaugaugc

SEQ ID NO: 25808 - RNA, 20 nt, Artificial Sequence
  targeting sequence with TTCN PAM
acauagcugaagagggcguc

SEQ ID NO: 25809 - RNA, 20 nt, Artificial Sequence
  targeting sequence with TTCN PAM
gcuauguggaacgguucuuu

SEQ ID NO: 25810 - RNA, 20 nt, Artificial Sequence
  targeting sequence with TTCN PAM
agagaaaggcaauaaaaacc

SEQ ID NO: 25811 - RNA, 20 nt, Artificial Sequence
  targeting sequence with TTCN PAM
cuggaagcacugggacgccc

SEQ ID NO: 25812 - RNA, 20 nt, Artificial Sequence
  targeting sequence with TTCN PAM
uugugguuuuuauugccuuu

SEQ ID NO: 25813 - RNA, 20 nt, Artificial Sequence
  targeting sequence with TTCN PAM
gcacuuuauuccuugugguu

SEQ ID NO: 25814 - RNA, 20 nt, Artificial Sequence
  targeting sequence with TTCN PAM
ugagggggaccacacaguug

SEQ ID NO: 25815 - RNA, 20 nt, Artificial Sequence
  targeting sequence with TTCN PAM
gggcaaacucaucaacaucc

SEQ ID NO: 25816 - RNA, 20 nt, Artificial Sequence
  targeting sequence with TTCN PAM
gggcaguggcauucuccagc

SEQ ID NO: 25817 - RNA, 20 nt, Artificial Sequence
  targeting sequence with TTCN PAM
ccagcccuucuagcugcacc

SEQ ID NO: 25818 - RNA, 20 nt, Artificial Sequence
  targeting sequence with TTCN PAM
agcugcaccaccugcugcug

SEQ ID NO: 25819 - RNA, 20 nt, Artificial Sequence
  targeting sequence with TTCN PAM
ggcccacaggaggcccugga

SEQ ID NO: 25820 - RNA, 20 nt, Artificial Sequence
  targeting sequence with TTCN PAM
cuguucuggcccacaggagg

SEQ ID NO: 25821 - RNA, 20 nt, Artificial Sequence
  targeting sequence with TTCN PAM
gcucacaaguauucugagau

SEQ ID NO: 25822 - RNA, 20 nt, Artificial Sequence
  targeting sequence with TTCN PAM
gagaugcugacaugcccccu

SEQ ID NO: 25823 - RNA, 20 nt, Artificial Sequence
  targeting sequence with TTCN PAM
aggcuccagcauauuuauaa

SEQ ID NO: 25824 - RNA, 20 nt, Artificial Sequence
  targeting sequence with TTCN PAM
uucaaggcuccagcauauuu

SEQ ID NO: 25825 - RNA, 20 nt, Artificial Sequence
  targeting sequence with TTCN PAM
agugauuauuauucccccaa

SEQ ID NO: 25826 - RNA, 20 nt, Artificial Sequence
  targeting sequence with TTCN PAM
cccaaauugcccuccacugc

SEQ ID NO: 25827 - RNA, 20 nt, Artificial Sequence
  targeting sequence with TTCN PAM
agugggaugagucacaggaa

SEQ ID NO: 25828 - RNA, 20 nt, Artificial Sequence
  targeting sequence with TTCN PAM
ugugacucaucccacuggaa

SEQ ID NO: 25829 - RNA, 20 nt, Artificial Sequence
  targeting sequence with TTCN PAM
agacuaaauaaauguuaagu

SEQ ID NO: 25830 - RNA, 20 nt, Artificial Sequence
  targeting sequence with TTCN PAM
uugaaaauuaaucuaaguug

SEQ ID NO: 25831 - RNA, 20 nt, Artificial Sequence
  targeting sequence with TTCN PAM
augaaaaaagagcauauauu

SEQ ID NO: 25832 - RNA, 20 nt, Artificial Sequence
  targeting sequence with TTCN PAM
gugcaacuuagauuaauuuu

SEQ ID NO: 25833 - RNA, 20 nt, Artificial Sequence
  targeting sequence with TTCN PAM
acauaaaaaauuucaaauag

SEQ ID NO: 25834 - RNA, 20 nt, Artificial Sequence
  targeting sequence with TTCN PAM
aauaggauagucucucuuga

SEQ ID NO: 25835 - RNA, 20 nt, Artificial Sequence
  targeting sequence with TTCN PAM
uucaauuccaaucccugucc

SEQ ID NO: 25836 - RNA, 20 nt, Artificial Sequence
  targeting sequence with TTCN PAM
auuccaaucccugucccuga

SEQ ID NO: 25837 - RNA, 20 nt, Artificial Sequence
  targeting sequence with TTCN PAM
aaucccugucccugaggcag

SEQ ID NO: 25838 - RNA, 20 nt, Artificial Sequence
  targeting sequence with TTCN PAM
cccuuuuauguguguaagug

SEQ ID NO: 25839 - RNA, 20 nt, Artificial Sequence
  targeting sequence with TTCN PAM
uugacacauauaugcauaca

SEQ ID NO: 25840 - RNA, 20 nt, Artificial Sequence
  targeting sequence with TTCN PAM
guauauuuuccuugacacau

SEQ ID NO: 25841 - RNA, 20 nt, Artificial Sequence
  targeting sequence with TTCN PAM
uaucuguaaacuaaaaauaa

SEQ ID NO: 25842 - RNA, 20 nt, Artificial Sequence
  targeting sequence with TTCN PAM
uuuggcugggggucuuagga

SEQ ID NO: 25843 - RNA, 20 nt, Artificial Sequence
  targeting sequence with TTCN PAM
uugggguccacuuuggccaa

SEQ ID NO: 25844 - RNA, 20 nt, Artificial Sequence
  targeting sequence with TTCN PAM
gguuucuuugggguccacuu

SEQ ID NO: 25845 - RNA, 20 nt, Artificial Sequence
  targeting sequence with TTCN PAM
uggcaaugaugggaaagagg

SEQ ID NO: 25846 - RNA, 20 nt, Artificial Sequence
  targeting sequence with TTCN PAM
caucauugccaagaacucac

SEQ ID NO: 25847 - RNA, 20 nt, Artificial Sequence
  targeting sequence with TTCN PAM
cauuaaugcuggucauuugu

SEQ ID NO: 25848 - RNA, 20 nt, Artificial Sequence
  targeting sequence with TTCN PAM
gucagucuuaugaucucuau

SEQ ID NO: 25849 - RNA, 20 nt, Artificial Sequence
  targeting sequence with TTCN PAM
uuccaaccugacucagguau

SEQ ID NO: 25850 - RNA, 20 nt, Artificial Sequence
  targeting sequence with TTCN PAM
aaccugacucagguauagca

SEQ ID NO: 25851 - RNA, 20 nt, Artificial Sequence
  targeting sequence with TTCN PAM
agucuuuacacaaagcuuaa

SEQ ID NO: 25852 - RNA, 20 nt, Artificial Sequence
  targeting sequence with TTCN PAM
accgacugccagcuaaaaaa

SEQ ID NO: 25853 - RNA, 20 nt, Artificial Sequence
  targeting sequence with TTCN PAM
uaaagcccacuaugacuugu

SEQ ID NO: 25854 - RNA, 20 nt, Artificial Sequence
  targeting sequence with TTCN PAM
auguguugauuuaggauuuu

SEQ ID NO: 25855 - RNA, 20 nt, Artificial Sequence
  targeting sequence with TTCN PAM
ugucucccugaaauguauaa

SEQ ID NO: 25856 - RNA, 20 nt, Artificial Sequence
  targeting sequence with TTCN PAM
gggagacaggaauuguaggu

SEQ ID NO: 25857 - RNA, 20 nt, Artificial Sequence
  targeting sequence with TTCN PAM
ggcauauuuucucaggaccu

SEQ ID NO: 25858 - RNA, 20 nt, Artificial Sequence
  targeting sequence with TTCN PAM
caggaccucuucagacugug

SEQ ID NO: 25859 - RNA, 20 nt, Artificial Sequence
  targeting sequence with TTCN PAM
gacuguguuccccaggccau

SEQ ID NO: 25860 - RNA, 20 nt, Artificial Sequence
  targeting sequence with TTCN PAM
ccaggccaugguuacuugua

SEQ ID NO: 25861 - RNA, 20 nt, Artificial Sequence
  targeting sequence with TTCN PAM
gagccaauacaaguaaccau

SEQ ID NO: 25862 - RNA, 20 nt, Artificial Sequence
  targeting sequence with TTCN PAM
aaacauggaauaguaucaca

SEQ ID NO: 25863 - RNA, 20 nt, Artificial Sequence
  targeting sequence with TTCN PAM
auguuuggaaaagccaaacc

SEQ ID NO: 25864 - RNA, 20 nt, Artificial Sequence
  targeting sequence with TTCN PAM
uauagugugauacuauucca

SEQ ID NO: 25865 - RNA, 20 nt, Artificial Sequence
  targeting sequence with TTCN PAM
caacuugcuuuuuuuuucau

SEQ ID NO: 25866 - RNA, 20 nt, Artificial Sequence
  targeting sequence with TTCN PAM
uucaacagugggucuuggug

SEQ ID NO: 25867 - RNA, 20 nt, Artificial Sequence
  targeting sequence with TTCN PAM
acagugggucuuggugaucu

SEQ ID NO: 25868 - RNA, 20 nt, Artificial Sequence
  targeting sequence with TTCN PAM
guguauugacauggagagau

SEQ ID NO: 25869 - RNA, 20 nt, Artificial Sequence
  targeting sequence with TTCN PAM
cccuuggggauuuuuagguu

SEQ ID NO: 25870 - RNA, 20 nt, Artificial Sequence
  targeting sequence with TTCN PAM
acuuuuccacuauaacaaug

SEQ ID NO: 25871 - RNA, 20 nt, Artificial Sequence
  targeting sequence with TTCN PAM
acuauaacaaugaugcagug

SEQ ID NO: 25872 - RNA, 20 nt, Artificial Sequence
  targeting sequence with TTCN PAM
cugcaucauuguuauagugg

SEQ ID NO: 25873 - RNA, 20 nt, Artificial Sequence
  targeting sequence with TTCN PAM
uugaacaugcuuccuuauac

SEQ ID NO: 25874 - RNA, 20 nt, Artificial Sequence
  targeting sequence with TTCN PAM
aagaauguucacugcaucau

SEQ ID NO: 25875 - RNA, 20 nt, Artificial Sequence
  targeting sequence with TTCN PAM
uuauacacacuaccuggugu

SEQ ID NO: 25876 - RNA, 20 nt, Artificial Sequence
  targeting sequence with TTCN PAM
aagucaagucaaucccugac

SEQ ID NO: 25877 - RNA, 20 nt, Artificial Sequence
  targeting sequence with TTCN PAM
acugaugucagggauugacu

SEQ ID NO: 25878 - RNA, 20 nt, Artificial Sequence
  targeting sequence with TTCN PAM
uaagaagggcacacucuccu

SEQ ID NO: 25879 - RNA, 20 nt, Artificial Sequence
  targeting sequence with TTCN PAM
uaagaaggcagaucagagau

SEQ ID NO: 25880 - RNA, 20 nt, Artificial Sequence
  targeting sequence with TTCN PAM
ugcuauuuuuuugagacgga

SEQ ID NO: 25881 - RNA, 20 nt, Artificial Sequence
  targeting sequence with TTCN PAM
ggccauucuucugccucagc

SEQ ID NO: 25882 - RNA, 20 nt, Artificial Sequence
  targeting sequence with TTCN PAM
ucugccucagccuccugagu

SEQ ID NO: 25883 - RNA, 20 nt, Artificial Sequence
  targeting sequence with TTCN PAM
gccucagccuccugaguagc

SEQ ID NO: 25884 - RNA, 20 nt, Artificial Sequence
  targeting sequence with TTCN PAM
ccguguuaggauggucuuga

SEQ ID NO: 25885 - RNA, 20 nt, Artificial Sequence
  targeting sequence with TTCN PAM
ugcuauuuuuuaacuuuaua

SEQ ID NO: 25886 - RNA, 20 nt, Artificial Sequence
  targeting sequence with TTCN PAM
guaucgcucaauuacuaaaa

SEQ ID NO: 25887 - RNA, 20 nt, Artificial Sequence
  targeting sequence with TTCN PAM
aguuuuuuuaguaauugagc

SEQ ID NO: 25888 - RNA, 20 nt, Artificial Sequence
  targeting sequence with TTCN PAM
uuaauguauuaguauuuuac

SEQ ID NO: 25889 - RNA, 20 nt, Artificial Sequence
  targeting sequence with TTCN PAM
aaacauuagacucauuaaug

SEQ ID NO: 25890 - RNA, 20 nt, Artificial Sequence
  targeting sequence with TTCN PAM
aauugcauauguuauaagac

SEQ ID NO: 25891 - RNA, 20 nt, Artificial Sequence
  targeting sequence with TTCN PAM
auuuaacauacgccuaauuc

SEQ ID NO: 25892 - RNA, 20 nt, Artificial Sequence
  targeting sequence with TTCN PAM
cacaccuccccccaaccccc

SEQ ID NO: 25893 - RNA, 20 nt, Artificial Sequence
  targeting sequence with TTCN PAM
ccucaaggucauagccuuca

SEQ ID NO: 25894 - RNA, 20 nt, Artificial Sequence
  targeting sequence with TTCN PAM
cucaugaguuuaaauuaauu

SEQ ID NO: 25895 - RNA, 20 nt, Artificial Sequence
  targeting sequence with TTCN PAM
aaaguauucaagggauagaa

SEQ ID NO: 25896 - RNA, 20 nt, Artificial Sequence
  targeting sequence with TTCN PAM
agggauagaaccuauuuccc

SEQ ID NO: 25897 - RNA, 20 nt, Artificial Sequence
  targeting sequence with TTCN PAM
aucccuugaauacuuuggaa

SEQ ID NO: 25898 - RNA, 20 nt, Artificial Sequence
  targeting sequence with TTCN PAM
cuagcuauggucagauaucc

SEQ ID NO: 25899 - RNA, 20 nt, Artificial Sequence
  targeting sequence with TTCN PAM
gguccugguuuccugggauu

SEQ ID NO: 25900 - RNA, 20 nt, Artificial Sequence
  targeting sequence with TTCN PAM
ugggauuugagguaaggcuu

SEQ ID NO: 25901 - RNA, 20 nt, Artificial Sequence
  targeting sequence with TTCN PAM
gacugacgccaacuauagac

SEQ ID NO: 25902 - RNA, 20 nt, Artificial Sequence
  targeting sequence with TTCN PAM
ggacuggacagcauccauug

SEQ ID NO: 25903 - RNA, 20 nt, Artificial Sequence
  targeting sequence with TTCN PAM
uaagauccuucuggacugga

SEQ ID NO: 25904 - RNA, 20 nt, Artificial Sequence
  targeting sequence with TTCN PAM
ggcccugcuuauguuuuaau

SEQ ID NO: 25905 - RNA, 20 nt, Artificial Sequence
  targeting sequence with TTCN PAM
ucaggcccugcuuauguuuu

SEQ ID NO: 25906 - RNA, 20 nt, Artificial Sequence
  targeting sequence with TTCN PAM
cuugauucuuuuaggcuguu

SEQ ID NO: 25907 - RNA, 20 nt, Artificial Sequence
  targeting sequence with TTCN PAM
uuuaggcuguuguaauacaa

SEQ ID NO: 25908 - RNA, 20 nt, Artificial Sequence
  targeting sequence with TTCN PAM
ggcccacuucccuucucuga

SEQ ID NO: 25909 - RNA, 20 nt, Artificial Sequence
  targeting sequence with TTCN PAM
cuucucugagacuagugucu

SEQ ID NO: 25910 - RNA, 20 nt, Artificial Sequence
  targeting sequence with TTCN PAM
cugagacuagugucuuucaa

SEQ ID NO: 25911 - RNA, 20 nt, Artificial Sequence
  targeting sequence with TTCN PAM
aaaugcuuucauaugaaacc

SEQ ID NO: 25912 - RNA, 20 nt, Artificial Sequence
  targeting sequence with TTCN PAM
uaugaaaccacuaagaacua

SEQ ID NO: 25913 - RNA, 20 nt, Artificial Sequence
  targeting sequence with TTCN PAM
uaugaaagcauuuugaaaga

SEQ ID NO: 25914 - RNA, 20 nt, Artificial Sequence
  targeting sequence with TTCN PAM
uagugguuucauaugaaagc

SEQ ID NO: 25915 - RNA, 20 nt, Artificial Sequence
  targeting sequence with TTCN PAM
cuaaauaccuccauauagaa

SEQ ID NO: 25916 - RNA, 20 nt, Artificial Sequence
  targeting sequence with TTCN PAM
auauggagguauuuagggaa

SEQ ID NO: 25917 - RNA, 20 nt, Artificial Sequence
  targeting sequence with TTCN PAM
uauuucuauauggagguauu

SEQ ID NO: 25918 - RNA, 20 nt, Artificial Sequence
  targeting sequence with TTCN PAM
acuuccucacagaauaaaau

SEQ ID NO: 25919 - RNA, 20 nt, Artificial Sequence
  targeting sequence with TTCN PAM
ucacagaauaaaauagaugg

SEQ ID NO: 25920 - RNA, 20 nt, Artificial Sequence
  targeting sequence with TTCN PAM
gugaggaaguagaauauuua

SEQ ID NO: 25921 - RNA, 20 nt, Artificial Sequence
  targeting sequence with TTCN PAM
ugcaaacugucaggcaaugu

SEQ ID NO: 25922 - RNA, 20 nt, Artificial Sequence
  targeting sequence with TTCN PAM
agcugccaaauccaaaucuc

SEQ ID NO: 25923 - RNA, 20 nt, Artificial Sequence
  targeting sequence with TTCN PAM
cacagaaggagaagacaagg

SEQ ID NO: 25924 - RNA, 20 nt, Artificial Sequence
  targeting sequence with TTCN PAM
gugggaaagggggcuuuuau

SEQ ID NO: 25925 - RNA, 20 nt, Artificial Sequence
  targeting sequence with TTCN PAM
ccuucugugggaaagggggc

SEQ ID NO: 25926 - RNA, 20 nt, Artificial Sequence
  targeting sequence with TTCN PAM
aaagcagcucugacaaguau

SEQ ID NO: 25927 - RNA, 20 nt, Artificial Sequence
  targeting sequence with TTCN PAM
ugugguuuuccauacacuga

SEQ ID NO: 25928 - RNA, 20 nt, Artificial Sequence
  targeting sequence with TTCN PAM
auacacugagauuacuguga

SEQ ID NO: 25929 - RNA, 20 nt, Artificial Sequence
  targeting sequence with TTCN PAM
uaggaucacaguaaucucag

SEQ ID NO: 25930 - RNA, 20 nt, Artificial Sequence
  targeting sequence with TTCN PAM
caaguaccaagcagacauac

SEQ ID NO: 25931 - RNA, 20 nt, Artificial Sequence
  targeting sequence with TTCN PAM
caaaaguuuauaccauuuug

SEQ ID NO: 25932 - RNA, 20 nt, Artificial Sequence
  targeting sequence with TTCN PAM
uuguucucuaccuucucauc

SEQ ID NO: 25933 - RNA, 20 nt, Artificial Sequence
  targeting sequence with TTCN PAM
cuaccuucucaucuuuuuuc

SEQ ID NO: 25934 - RNA, 20 nt, Artificial Sequence
  targeting sequence with TTCN PAM
caucuuuuuuccuuccgcug

SEQ ID NO: 25935 - RNA, 20 nt, Artificial Sequence
  targeting sequence with TTCN PAM
uuccgcuguuuuccuuuuuu

SEQ ID NO: 25936 - RNA, 20 nt, Artificial Sequence
  targeting sequence with TTCN PAM
gcuguuuuccuuuuuucuuu

SEQ ID NO: 25937 - RNA, 20 nt, Artificial Sequence
  targeting sequence with TTCN PAM
uuuuuucuuucuaacccuac

SEQ ID NO: 25938 - RNA, 20 nt, Artificial Sequence
  targeting sequence with TTCN PAM
uucuaacccuacuguauuuu

SEQ ID NO: 25939 - RNA, 20 nt, Artificial Sequence
  targeting sequence with TTCN PAM
aacccuacuguauuuugcau

SEQ ID NO: 25940 - RNA, 20 nt, Artificial Sequence
  targeting sequence with TTCN PAM
uucauacuaaccuggauguc

SEQ ID NO: 25941 - RNA, 20 nt, Artificial Sequence
  targeting sequence with TTCN PAM
uacuaaccuggaugucccgg

SEQ ID NO: 25942 - RNA, 20 nt, Artificial Sequence
  targeting sequence with TTCN PAM
uaggacugauacgcgauuuu

SEQ ID NO: 25943 - RNA, 20 nt, Artificial Sequence
  targeting sequence with TTCN PAM
uccaugcuugccaguuccug

SEQ ID NO: 25944 - RNA, 20 nt, Artificial Sequence
  targeting sequence with TTCN PAM
augcuugccaguuccugcuu

SEQ ID NO: 25945 - RNA, 20 nt, Artificial Sequence
  targeting sequence with TTCN PAM
ugcuucaaguucaagauuuc

SEQ ID NO: 25946 - RNA, 20 nt, Artificial Sequence
  targeting sequence with TTCN PAM
aguucaagauuucauucugg

SEQ ID NO: 25947 - RNA, 20 nt, Artificial Sequence
  targeting sequence with TTCN PAM
agauuucauucugguggagc

SEQ ID NO: 25948 - RNA, 20 nt, Artificial Sequence
  targeting sequence with TTCN PAM
uucugguggagcucuguuag

SEQ ID NO: 25949 - RNA, 20 nt, Artificial Sequence
  targeting sequence with TTCN PAM
gguggagcucuguuagguca

SEQ ID NO: 25950 - RNA, 20 nt, Artificial Sequence
  targeting sequence with TTCN PAM
uccaaucguucacaucuaag

SEQ ID NO: 25951 - RNA, 20 nt, Artificial Sequence
  targeting sequence with TTCN PAM
aaucguucacaucuaaggag

SEQ ID NO: 25952 - RNA, 20 nt, Artificial Sequence
  targeting sequence with TTCN PAM
caucuaaggagaaaaaaaaa

SEQ ID NO: 25953 - RNA, 20 nt, Artificial Sequence
  targeting sequence with TTCN PAM
ccuuagaugugaacgauugg

SEQ ID NO: 25954 - RNA, 20 nt, Artificial Sequence
  targeting sequence with TTCN PAM
aaacuuuuuuuuucuccuua

SEQ ID NO: 25955 - RNA, 20 nt, Artificial Sequence
  targeting sequence with TTCN PAM
uaaaauucuaaacuuuuuuu

SEQ ID NO: 25956 - RNA, 20 nt, Artificial Sequence
  targeting sequence with TTCN PAM
gugaauaucuuuccuggcau

SEQ ID NO: 25957 - RNA, 20 nt, Artificial Sequence
  targeting sequence with TTCN PAM
cagaauucauaaaauucuaa

SEQ ID NO: 25958 - RNA, 20 nt, Artificial Sequence
  targeting sequence with TTCN PAM
uggcauuauuuacauccaac

SEQ ID NO: 25959 - RNA, 20 nt, Artificial Sequence
  targeting sequence with TTCN PAM
acaaaggaauagaagcacaa

SEQ ID NO: 25960 - RNA, 20 nt, Artificial Sequence
  targeting sequence with TTCN PAM
uuuguagaauguguuuuggg

SEQ ID NO: 25961 - RNA, 20 nt, Artificial Sequence
  targeting sequence with TTCN PAM
auuccuuuguagaauguguu

SEQ ID NO: 25962 - RNA, 20 nt, Artificial Sequence
  targeting sequence with TTCN PAM
uugugcuucuauuccuuugu

SEQ ID NO: 25963 - RNA, 20 nt, Artificial Sequence
  targeting sequence with TTCN PAM
agagacuaagagcuauaccc

SEQ ID NO: 25964 - RNA, 20 nt, Artificial Sequence
  targeting sequence with TTCN PAM
auaaucuuuucaauacacag

SEQ ID NO: 25965 - RNA, 20 nt, Artificial Sequence
  targeting sequence with TTCN PAM
auacacaguauuugcagcga

SEQ ID NO: 25966 - RNA, 20 nt, Artificial Sequence
  targeting sequence with TTCN PAM
gaggagccuaaugacugucu

SEQ ID NO: 25967 - RNA, 20 nt, Artificial Sequence
  targeting sequence with TTCN PAM
ugaggcuugcuuaauuguac

SEQ ID NO: 25968 - RNA, 20 nt, Artificial Sequence
  targeting sequence with TTCN PAM
auugguguguuaucuuuuca

SEQ ID NO: 25969 - RNA, 20 nt, Artificial Sequence
  targeting sequence with TTCN PAM
ggcagucaccaguagcuuau

SEQ ID NO: 25970 - RNA, 20 nt, Artificial Sequence
  targeting sequence with TTCN PAM
agaacuggccagcucacuca

SEQ ID NO: 25971 - RNA, 20 nt, Artificial Sequence
  targeting sequence with TTCN PAM
ggaauaagcuacuggugacu

SEQ ID NO: 25972 - RNA, 20 nt, Artificial Sequence
  targeting sequence with TTCN PAM
gagcccuagaaugccagagc

SEQ ID NO: 25973 - RNA, 20 nt, Artificial Sequence
  targeting sequence with TTCN PAM
agggcucugaaucgcaaaca

SEQ ID NO: 25974 - RNA, 20 nt, Artificial Sequence
  targeting sequence with TTCN PAM
gucaacaaauauuuacugag

SEQ ID NO: 25975 - RNA, 20 nt, Artificial Sequence
  targeting sequence with TTCN PAM
aaguacugggaauauugugg

SEQ ID NO: 25976 - RNA, 20 nt, Artificial Sequence
  targeting sequence with TTCN PAM
caguacuuugaacaugccug

SEQ ID NO: 25977 - RNA, 20 nt, Artificial Sequence
  targeting sequence with TTCN PAM
cauauggagaaguaaaacaa

SEQ ID NO: 25978 - RNA, 20 nt, Artificial Sequence
  targeting sequence with TTCN PAM
ccauaugggaaaucaucuug

SEQ ID NO: 25979 - RNA, 20 nt, Artificial Sequence
  targeting sequence with TTCN PAM
uuguuuuacuucuccauaug

SEQ ID NO: 25980 - RNA, 20 nt, Artificial Sequence
  targeting sequence with TTCN PAM
aggcugggcaugguggcuca

SEQ ID NO: 25981 - RNA, 20 nt, Artificial Sequence
  targeting sequence with TTCN PAM
agguggaaaaaugaauguga

SEQ ID NO: 25982 - RNA, 20 nt, Artificial Sequence
  targeting sequence with TTCN PAM
accuagaaucucugaucuca

SEQ ID NO: 25983 - RNA, 20 nt, Artificial Sequence
  targeting sequence with TTCN PAM
uuuuuccaccuagaaucucu

SEQ ID NO: 25984 - RNA, 20 nt, Artificial Sequence
  targeting sequence with TTCN PAM
cuccagcccuuuacucacau

SEQ ID NO: 25985 - RNA, 20 nt, Artificial Sequence
  targeting sequence with TTCN PAM
guacauuuaucauccauuuc

SEQ ID NO: 25986 - RNA, 20 nt, Artificial Sequence
  targeting sequence with TTCN PAM
aguuauucuguacauuuauc

SEQ ID NO: 25987 - RNA, 20 nt, Artificial Sequence
  targeting sequence with TTCN PAM
uccaacauagaugcacuauu

SEQ ID NO: 25988 - RNA, 20 nt, Artificial Sequence
  targeting sequence with TTCN PAM
cauuuuuuccuccaacauag

SEQ ID NO: 25989 - RNA, 20 nt, Artificial Sequence
  targeting sequence with TTCN PAM
agauuucccauuuuuuccuc

SEQ ID NO: 25990 - RNA, 20 nt, Artificial Sequence
  targeting sequence with TTCN PAM
gaucuuccagauuucccauu

SEQ ID NO: 25991 - RNA, 20 nt, Artificial Sequence
  targeting sequence with TTCN PAM
agaauugauauuaaaugagc

SEQ ID NO: 25992 - RNA, 20 nt, Artificial Sequence
  targeting sequence with TTCN PAM
agaaucccaacucuucggau

SEQ ID NO: 25993 - RNA, 20 nt, Artificial Sequence
  targeting sequence with TTCN PAM
uugggcucauuuaauaucaa

SEQ ID NO: 25994 - RNA, 20 nt, Artificial Sequence
  targeting sequence with TTCN PAM
ucaugugacuccucugcuca

SEQ ID NO: 25995 - RNA, 20 nt, Artificial Sequence
  targeting sequence with TTCN PAM
uaaaaacacauauucaucau

SEQ ID NO: 25996 - RNA, 20 nt, Artificial Sequence
  targeting sequence with TTCN PAM
cauaguggugaagaagaccg

SEQ ID NO: 25997 - RNA, 20 nt, Artificial Sequence
  targeting sequence with TTCN PAM
ccacuaugagaagacucguu

SEQ ID NO: 25998 - RNA, 20 nt, Artificial Sequence
  targeting sequence with TTCN PAM
ucaccacuaugagaagacuc

SEQ ID NO: 25999 - RNA, 20 nt, Artificial Sequence
  targeting sequence with TTCN PAM
ugggacuccacauacaaccu

SEQ ID NO: 26000 - RNA, 20 nt, Artificial Sequence
  targeting sequence with TTCN PAM
ccuaucuacuuagcucuuua

SEQ ID NO: 26001 - RNA, 20 nt, Artificial Sequence
  targeting sequence with TTCN PAM
accuuucuccuaucuacuua

SEQ ID NO: 26002 - RNA, 20 nt, Artificial Sequence
  targeting sequence with TTCN PAM
aguguuuuuuaaauguggag

SEQ ID NO: 26003 - RNA, 20 nt, Artificial Sequence
  targeting sequence with TTCN PAM
cuuuucuaguguuuuuuaaa

SEQ ID NO: 26004 - RNA, 20 nt, Artificial Sequence
  targeting sequence with TTCN PAM
ucccuuuucuaguguuuuuu

SEQ ID NO: 26005 - RNA, 20 nt, Artificial Sequence
  targeting sequence with TTCN PAM
ggugccuagaauggaaaccu

SEQ ID NO: 26006 - RNA, 20 nt, Artificial Sequence
  targeting sequence with TTCN PAM
aggcaccagaagcuagacau

SEQ ID NO: 26007 - RNA, 20 nt, Artificial Sequence
  targeting sequence with TTCN PAM
auucuaggcaccagaagcua

SEQ ID NO: 26008 - RNA, 20 nt, Artificial Sequence
  targeting sequence with TTCN PAM
cuguugggaugagagcuacc

SEQ ID NO: 26009 - RNA, 20 nt, Artificial Sequence
  targeting sequence with TTCN PAM
uacuaaaagaauaaaaaugc

SEQ ID NO: 26010 - RNA, 20 nt, Artificial Sequence
  targeting sequence with TTCN PAM
uuuaguaugaagucccuuga

SEQ ID NO: 26011 - RNA, 20 nt, Artificial Sequence
  targeting sequence with TTCN PAM
ggcauuuuuauucuuuuagu

SEQ ID NO: 26012 - RNA, 20 nt, Artificial Sequence
  targeting sequence with TTCN PAM
uucuucuuuuuaaucacauc

SEQ ID NO: 26013 - RNA, 20 nt, Artificial Sequence
  targeting sequence with TTCN PAM
ucuuuuuaaucacaucuaua

SEQ ID NO: 26014 - RNA, 20 nt, Artificial Sequence
  targeting sequence with TTCN PAM
uuuuaaucacaucuauaaua

SEQ ID NO: 26015 - RNA, 20 nt, Artificial Sequence
  targeting sequence with TTCN PAM
uuaaaaguuuguuuacauau

SEQ ID NO: 26016 - RNA, 20 nt, Artificial Sequence
  targeting sequence with TTCN PAM
uuauauucuuuaaaaguuug

SEQ ID NO: 26017 - RNA, 20 nt, Artificial Sequence
  targeting sequence with TTCN PAM
guguuuaagguaauuuuuau

SEQ ID NO: 26018 - RNA, 20 nt, Artificial Sequence
  targeting sequence with TTCN PAM
cccuuccaauaauuaugcaa

SEQ ID NO: 26019 - RNA, 20 nt, Artificial Sequence
  targeting sequence with TTCN PAM
aauaauuaugcaauaaauaa

SEQ ID NO: 26020 - RNA, 20 nt, Artificial Sequence
  targeting sequence with TTCN PAM
aagaaacaaggauuuuuuua

SEQ ID NO: 26021 - RNA, 20 nt, Artificial Sequence
  targeting sequence with TTCN PAM
uagaaaagcaguggaguuua

SEQ ID NO: 26022 - RNA, 20 nt, Artificial Sequence
  targeting sequence with TTCN PAM
ucuuuauccuugauaggagu

SEQ ID NO: 26023 - RNA, 20 nt, Artificial Sequence
  targeting sequence with TTCN PAM
uuauccuugauaggagucuc

SEQ ID NO: 26024 - RNA, 20 nt, Artificial Sequence
  targeting sequence with TTCN PAM
uuuaugcugaaacucuuccu

SEQ ID NO: 26025 - RNA, 20 nt, Artificial Sequence
  targeting sequence with TTCN PAM
gcauaaaagaaggcaguaua

SEQ ID NO: 26026 - RNA, 20 nt, Artificial Sequence
  targeting sequence with TTCN PAM
uguuauugaagugacugaac

SEQ ID NO: 26027 - RNA, 20 nt, Artificial Sequence
  targeting sequence with TTCN PAM
auaacaggaagaguuucagc

SEQ ID NO: 26028 - RNA, 20 nt, Artificial Sequence
  targeting sequence with TTCN PAM
gucacuucaauaacaggaag

SEQ ID NO: 26029 - RNA, 20 nt, Artificial Sequence
  targeting sequence with TTCN PAM
cauuagccuguucagucacu

SEQ ID NO: 26030 - RNA, 20 nt, Artificial Sequence
  targeting sequence with TTCN PAM
cugugacucugccuuuuccu

SEQ ID NO: 26031 - RNA, 20 nt, Artificial Sequence
  targeting sequence with TTCN PAM
uuucaucugcugcccagagu

SEQ ID NO: 26032 - RNA, 20 nt, Artificial Sequence
  targeting sequence with TTCN PAM
ucugcugcccagaguacgug

SEQ ID NO: 26033 - RNA, 20 nt, Artificial Sequence
  targeting sequence with TTCN PAM
ugaucacguacucugggcag

SEQ ID NO: 26034 - RNA, 20 nt, Artificial Sequence
  targeting sequence with TTCN PAM
agggaugggaccuguuccug

SEQ ID NO: 26035 - RNA, 20 nt, Artificial Sequence
  targeting sequence with TTCN PAM
accaaaauuuaaguucacaa

SEQ ID NO: 26036 - RNA, 20 nt, Artificial Sequence
  targeting sequence with TTCN PAM
caaaaugccauaagauaaug

SEQ ID NO: 26037 - RNA, 20 nt, Artificial Sequence
  targeting sequence with TTCN PAM
ugacuguccuauguuagccc

SEQ ID NO: 26038 - RNA, 20 nt, Artificial Sequence
  targeting sequence with TTCN PAM
gugguguuuucgguguuuga

SEQ ID NO: 26039 - RNA, 20 nt, Artificial Sequence
  targeting sequence with TTCN PAM
guguuugauaguuucaucau

SEQ ID NO: 26040 - RNA, 20 nt, Artificial Sequence
  targeting sequence with TTCN PAM
ucauucucucucuuuaccag

SEQ ID NO: 26041 - RNA, 20 nt, Artificial Sequence
  targeting sequence with TTCN PAM
cucucuuuaccagagagggg

SEQ ID NO: 26042 - RNA, 20 nt, Artificial Sequence
  targeting sequence with TTCN PAM
aaagugcuggucucuuggga

SEQ ID NO: 26043 - RNA, 20 nt, Artificial Sequence
  targeting sequence with TTCN PAM
cuuaaaucccaagagaccag

SEQ ID NO: 26044 - RNA, 20 nt, Artificial Sequence
  targeting sequence with TTCN PAM
ugccagauauaaccuuuccc

SEQ ID NO: 26045 - RNA, 20 nt, Artificial Sequence
  targeting sequence with TTCN PAM
ggcuucuuaggaaucuuauu

SEQ ID NO: 26046 - RNA, 20 nt, Artificial Sequence
  targeting sequence with TTCN PAM
uaggaaucuuauuugauauu

SEQ ID NO: 26047 - RNA, 20 nt, Artificial Sequence
  targeting sequence with TTCN PAM
uaagaagccugaaauuugua

SEQ ID NO: 26048 - RNA, 20 nt, Artificial Sequence
  targeting sequence with TTCN PAM
acugguauguaugagccaug

SEQ ID NO: 26049 - RNA, 20 nt, Artificial Sequence
  targeting sequence with TTCN PAM
uuucaacaaccccaagaggg

SEQ ID NO: 26050 - RNA, 20 nt, Artificial Sequence
  targeting sequence with TTCN PAM
acaaccccaagaggguagaa

SEQ ID NO: 26051 - RNA, 20 nt, Artificial Sequence
  targeting sequence with TTCN PAM
acccucuugggguuguugaa

SEQ ID NO: 26052 - RNA, 20 nt, Artificial Sequence
  targeting sequence with TTCN PAM
ucaucuauaaaaugcagaua

SEQ ID NO: 26053 - RNA, 20 nt, Artificial Sequence
  targeting sequence with TTCN PAM
guuuccucaucuauaaaaug

SEQ ID NO: 26054 - RNA, 20 nt, Artificial Sequence
  targeting sequence with TTCN PAM
cugagcuucuguuuccucau

SEQ ID NO: 26055 - RNA, 20 nt, Artificial Sequence
  targeting sequence with TTCN PAM
aaagugaauugcccaagggc

SEQ ID NO: 26056 - RNA, 20 nt, Artificial Sequence
  targeting sequence with TTCN PAM
cuuuagaacuucucugagcu

SEQ ID NO: 26057 - RNA, 20 nt, Artificial Sequence
  targeting sequence with TTCN PAM
aauccuugcugcccuacuua

SEQ ID NO: 26058 - RNA, 20 nt, Artificial Sequence
  targeting sequence with TTCN PAM
uaaacuuuacaaugugaugc

SEQ ID NO: 26059 - RNA, 20 nt, Artificial Sequence
  targeting sequence with TTCN PAM
aaauggcaucacauuguaaa

SEQ ID NO: 26060 - RNA, 20 nt, Artificial Sequence
  targeting sequence with TTCN PAM
uacuuaugaggagaguuagu

SEQ ID NO: 26061 - RNA, 20 nt, Artificial Sequence
  targeting sequence with TTCN PAM
agcucacuuuugcuaaguga

SEQ ID NO: 26062 - RNA, 20 nt, Artificial Sequence
  targeting sequence with TTCN PAM
cccaucaacuccacuuugac

SEQ ID NO: 26063 - RNA, 20 nt, Artificial Sequence
  targeting sequence with TTCN PAM
uaauuuuuuauuauacuccu

SEQ ID NO: 26064 - RNA, 20 nt, Artificial Sequence
  targeting sequence with TTCN PAM
ccaugcccucaccaacucuu

SEQ ID NO: 26065 - RNA, 20 nt, Artificial Sequence
  targeting sequence with TTCN PAM
caacagcaguauaugagggu

SEQ ID NO: 26066 - RNA, 20 nt, Artificial Sequence
  targeting sequence with TTCN PAM
auucccaacagcaguauaug

SEQ ID NO: 26067 - RNA, 20 nt, Artificial Sequence
  targeting sequence with TTCN PAM
accccagauauaacugaaaa

SEQ ID NO: 26068 - RNA, 20 nt, Artificial Sequence
  targeting sequence with TTCN PAM
guuauaucugggguagaauu

SEQ ID NO: 26069 - RNA, 20 nt, Artificial Sequence
  targeting sequence with TTCN PAM
uuucaguuauaucuggggua

SEQ ID NO: 26070 - RNA, 20 nt, Artificial Sequence
  targeting sequence with TTCN PAM
uuucuuuucaguuauaucug

SEQ ID NO: 26071 - RNA, 20 nt, Artificial Sequence
  targeting sequence with TTCN PAM
ucuauacaaaagcuuguaca

SEQ ID NO: 26072 - RNA, 20 nt, Artificial Sequence
  targeting sequence with TTCN PAM
auacaaaagcuuguacauga

SEQ ID NO: 26073 - RNA, 20 nt, Artificial Sequence
  targeting sequence with TTCN PAM
uguacaagcuuuuguauaga

SEQ ID NO: 26074 - RNA, 20 nt, Artificial Sequence
  targeting sequence with TTCN PAM
caccagcauuaaucaucauu

SEQ ID NO: 26075 - RNA, 20 nt, Artificial Sequence
  targeting sequence with TTCN PAM
cuguacaacaauauaucauc

SEQ ID NO: 26076 - RNA, 20 nt, Artificial Sequence
  targeting sequence with TTCN PAM
caagucaaguaucaauauuu

SEQ ID NO: 26077 - RNA, 20 nt, Artificial Sequence
  targeting sequence with TTCN PAM
guucacuuucuuccuuucuc

SEQ ID NO: 26078 - RNA, 20 nt, Artificial Sequence
  targeting sequence with TTCN PAM
cuuucuuccuuucuccuuca

SEQ ID NO: 26079 - RNA, 20 nt, Artificial Sequence
  targeting sequence with TTCN PAM
uccuuucuccuucaaucgau

SEQ ID NO: 26080 - RNA, 20 nt, Artificial Sequence
  targeting sequence with TTCN PAM
uuucuccuucaaucgaugga

SEQ ID NO: 26081 - RNA, 20 nt, Artificial Sequence
  targeting sequence with TTCN PAM
ccuucaaucgauggaugcuc

SEQ ID NO: 26082 - RNA, 20 nt, Artificial Sequence
  targeting sequence with TTCN PAM
aucgauggaugcucacagaa

SEQ ID NO: 26083 - RNA, 20 nt, Artificial Sequence
  targeting sequence with TTCN PAM
gugagcauccaucgauugaa

SEQ ID NO: 26084 - RNA, 20 nt, Artificial Sequence
  targeting sequence with TTCN PAM
aauguuucugugagcaucca

SEQ ID NO: 26085 - RNA, 20 nt, Artificial Sequence
  targeting sequence with TTCN PAM
cauuuguguuuuauguucua

SEQ ID NO: 26086 - RNA, 20 nt, Artificial Sequence
  targeting sequence with TTCN PAM
cuacauguaugcauaugaag

SEQ ID NO: 26087 - RNA, 20 nt, Artificial Sequence
  targeting sequence with TTCN PAM
uaugcauacauguagugaaa

SEQ ID NO: 26088 - RNA, 20 nt, Artificial Sequence
  targeting sequence with TTCN PAM
cucccacaacauggacuucc

SEQ ID NO: 26089 - RNA, 20 nt, Artificial Sequence
  targeting sequence with TTCN PAM
uuccuacugcagaaacaguu

SEQ ID NO: 26090 - RNA, 20 nt, Artificial Sequence
  targeting sequence with TTCN PAM
uacugcagaaacaguucaca

SEQ ID NO: 26091 - RNA, 20 nt, Artificial Sequence
  targeting sequence with TTCN PAM
gcaguaggaaggaaguccau

SEQ ID NO: 26092 - RNA, 20 nt, Artificial Sequence
  targeting sequence with TTCN PAM
caggagcaggaaggcuguug

SEQ ID NO: 26093 - RNA, 20 nt, Artificial Sequence
  targeting sequence with TTCN PAM
ugcuccugugaacuguuucu

SEQ ID NO: 26094 - RNA, 20 nt, Artificial Sequence
  targeting sequence with TTCN PAM
ucaucuucucaccugaccuu

SEQ ID NO: 26095 - RNA, 20 nt, Artificial Sequence
  targeting sequence with TTCN PAM
caccugaccuuucauaauau

SEQ ID NO: 26096 - RNA, 20 nt, Artificial Sequence
  targeting sequence with TTCN PAM
uaauauacagacacucuuug

SEQ ID NO: 26097 - RNA, 20 nt, Artificial Sequence
  targeting sequence with TTCN PAM
ugaaaacaauauuucccauu

SEQ ID NO: 26098 - RNA, 20 nt, Artificial Sequence
  targeting sequence with TTCN PAM
ggaaguaaccccaucguaag

SEQ ID NO: 26099 - RNA, 20 nt, Artificial Sequence
  targeting sequence with TTCN PAM
cauuuaugaugggcuuaaau

SEQ ID NO: 26100 - RNA, 20 nt, Artificial Sequence
  targeting sequence with TTCN PAM
ugcuagagugacauacaugu

SEQ ID NO: 26101 - RNA, 20 nt, Artificial Sequence
  targeting sequence with TTCN PAM
caggacuggggccugagaua

SEQ ID NO: 26102 - RNA, 20 nt, Artificial Sequence
  targeting sequence with TTCN PAM
cuagcagcagccugugggcu

SEQ ID NO: 26103 - RNA, 20 nt, Artificial Sequence
  targeting sequence with TTCN PAM
gacccaguaugaagacagca

SEQ ID NO: 26104 - RNA, 20 nt, Artificial Sequence
  targeting sequence with TTCN PAM
uacugggucugaacaaaaaa

SEQ ID NO: 26105 - RNA, 20 nt, Artificial Sequence
  targeting sequence with TTCN PAM
ugccucauguuauuuguaaa

SEQ ID NO: 26106 - RNA, 20 nt, Artificial Sequence
  targeting sequence with TTCN PAM
ccucuuucuugccucauguu

SEQ ID NO: 26107 - RNA, 20 nt, Artificial Sequence
  targeting sequence with TTCN PAM
gucugcuguuucaccucuuu

SEQ ID NO: 26108 - RNA, 20 nt, Artificial Sequence
  targeting sequence with TTCN PAM
aaaugauauugacagauuca

SEQ ID NO: 26109 - RNA, 20 nt, Artificial Sequence
  targeting sequence with TTCN PAM
agugcagccaagacuuuacc

SEQ ID NO: 26110 - RNA, 20 nt, Artificial Sequence
  targeting sequence with TTCN PAM
auagaaauagggaacuacuu

SEQ ID NO: 26111 - RNA, 20 nt, Artificial Sequence
  targeting sequence with TTCN PAM
auagaauuaaucccugguaa

SEQ ID NO: 26112 - RNA, 20 nt, Artificial Sequence
  targeting sequence with TTCN PAM
cuauuucuauagaauuaauc

SEQ ID NO: 26113 - RNA, 20 nt, Artificial Sequence
  targeting sequence with TTCN PAM
uacugcugaauucagguauc

SEQ ID NO: 26114 - RNA, 20 nt, Artificial Sequence
  targeting sequence with TTCN PAM
gcaguaggaaguaguucccu

SEQ ID NO: 26115 - RNA, 20 nt, Artificial Sequence
  targeting sequence with TTCN PAM
gguaucaagagcucauguaa

SEQ ID NO: 26116 - RNA, 20 nt, Artificial Sequence
  targeting sequence with TTCN PAM
uuguaacuccacagaacuaa

SEQ ID NO: 26117 - RNA, 20 nt, Artificial Sequence
  targeting sequence with TTCN PAM
guggaguuacaaagaacaag

SEQ ID NO: 26118 - RNA, 20 nt, Artificial Sequence
  targeting sequence with TTCN PAM
auuuuagaaagaacuuucua

SEQ ID NO: 26119 - RNA, 20 nt, Artificial Sequence
  targeting sequence with TTCN PAM
aaaauugaacuaaagaccaa

SEQ ID NO: 26120 - RNA, 20 nt, Artificial Sequence
  targeting sequence with TTCN PAM
uucuaaaauugaacuaaaga

SEQ ID NO: 26121 - RNA, 20 nt, Artificial Sequence
  targeting sequence with TTCN PAM
aauagcuaugucuaacaaug

SEQ ID NO: 26122 - RNA, 20 nt, Artificial Sequence
  targeting sequence with TTCN PAM
uuguuagacauagcuauuag

SEQ ID NO: 26123 - RNA, 20 nt, Artificial Sequence
  targeting sequence with TTCN PAM
aagauaguuuuuuucauugu

SEQ ID NO: 26124 - RNA, 20 nt, Artificial Sequence
  targeting sequence with TTCN PAM
aggagaggcugcuugucagg

SEQ ID NO: 26125 - RNA, 20 nt, Artificial Sequence
  targeting sequence with TTCN PAM
gcaacaucccugacaagcag

SEQ ID NO: 26126 - RNA, 20 nt, Artificial Sequence
  targeting sequence with TTCN PAM
auagaggauuuauuucugca

SEQ ID NO: 26127 - RNA, 20 nt, Artificial Sequence
  targeting sequence with TTCN PAM
aacaccuagaguuugauucu

SEQ ID NO: 26128 - RNA, 20 nt, Artificial Sequence
  targeting sequence with TTCN PAM
uuguagucagggaaccuguu

SEQ ID NO: 26129 - RNA, 20 nt, Artificial Sequence
  targeting sequence with TTCN PAM
cugacuacaaagaaucaaac

SEQ ID NO: 26130 - RNA, 20 nt, Artificial Sequence
  targeting sequence with TTCN PAM
uuuuucuuucuuucuuuuuu

SEQ ID NO: 26131 - RNA, 20 nt, Artificial Sequence
  targeting sequence with TTCN PAM
uucuuucuuuuuuuuuuuuu

SEQ ID NO: 26132 - RNA, 20 nt, Artificial Sequence
  targeting sequence with TTCN PAM
uucuuuuuuuuuuuuuuuuu

SEQ ID NO: 26133 - RNA, 20 nt, Artificial Sequence
  targeting sequence with TTCN PAM
uuuuuuuuuuuuuuuuuuua

SEQ ID NO: 26134 - RNA, 20 nt, Artificial Sequence
  targeting sequence with TTCN PAM
agagcucaagggauccuccc

SEQ ID NO: 26135 - RNA, 20 nt, Artificial Sequence
  targeting sequence with TTCN PAM
gaguagcugggacuacugac

SEQ ID NO: 26136 - RNA, 20 nt, Artificial Sequence
  targeting sequence with TTCN PAM
gagacagggucucacuaugu

SEQ ID NO: 26137 - RNA, 20 nt, Artificial Sequence
  targeting sequence with TTCN PAM
agaccagccugggcaacaua

SEQ ID NO: 26138 - RNA, 20 nt, Artificial Sequence
  targeting sequence with TTCN PAM
caaagugcugagacuacagg

SEQ ID NO: 26139 - RNA, 20 nt, Artificial Sequence
  targeting sequence with TTCN PAM
ucuuucaaacuauagauacu

SEQ ID NO: 26140 - RNA, 20 nt, Artificial Sequence
  targeting sequence with TTCN PAM
aacuauagauacuuuaaauu

SEQ ID NO: 26141 - RNA, 20 nt, Artificial Sequence
  targeting sequence with TTCN PAM
caacguauugauuuuaacaa

SEQ ID NO: 26142 - RNA, 20 nt, Artificial Sequence
  targeting sequence with TTCN PAM
uaaauuaccacuauuuugug

SEQ ID NO: 26143 - RNA, 20 nt, Artificial Sequence
  targeting sequence with TTCN PAM
caccugauuuuacauaguuc

SEQ ID NO: 26144 - RNA, 20 nt, Artificial Sequence
  targeting sequence with TTCN PAM
cuugguaugugaggugguga

SEQ ID NO: 26145 - RNA, 20 nt, Artificial Sequence
  targeting sequence with TTCN PAM
ucaccaccucacauaccaag

SEQ ID NO: 26146 - RNA, 20 nt, Artificial Sequence
  targeting sequence with TTCN PAM
uauauauuccucaccaccuc

SEQ ID NO: 26147 - RNA, 20 nt, Artificial Sequence
  targeting sequence with TTCN PAM
cugauucauauauauuccuc

SEQ ID NO: 26148 - RNA, 20 nt, Artificial Sequence
  targeting sequence with TTCN PAM
caacacuuuugaaccuuaca

SEQ ID NO: 26149 - RNA, 20 nt, Artificial Sequence
  targeting sequence with TTCN PAM
aaaguguugggaauaagugc

SEQ ID NO: 26150 - RNA, 20 nt, Artificial Sequence
  targeting sequence with TTCN PAM
uaugauaaacauugguuuau

SEQ ID NO: 26151 - RNA, 20 nt, Artificial Sequence
  targeting sequence with TTCN PAM
ggaagucauuuucaaacuag

SEQ ID NO: 26152 - RNA, 20 nt, Artificial Sequence
  targeting sequence with TTCN PAM
agaaccuuugacagguuugc

SEQ ID NO: 26153 - RNA, 20 nt, Artificial Sequence
  targeting sequence with TTCN PAM
aacuagauuuugguucaucc

SEQ ID NO: 26154 - RNA, 20 nt, Artificial Sequence
  targeting sequence with TTCN PAM
ucccauauuaugucuagagg

SEQ ID NO: 26155 - RNA, 20 nt, Artificial Sequence
  targeting sequence with TTCN PAM
cuccugccauuuugcaccua

SEQ ID NO: 26156 - RNA, 20 nt, Artificial Sequence
  targeting sequence with TTCN PAM
aggugcaaaauggcaggagu

SEQ ID NO: 26157 - RNA, 20 nt, Artificial Sequence
  targeting sequence with TTCN PAM
uaaugcaguuuguaccagcu

SEQ ID NO: 26158 - RNA, 20 nt, Artificial Sequence
  targeting sequence with TTCN PAM
uccucuauaaagaggaaauc

SEQ ID NO: 26159 - RNA, 20 nt, Artificial Sequence
  targeting sequence with TTCN PAM
ucuuuauagaggaugaaaag

SEQ ID NO: 26160 - RNA, 20 nt, Artificial Sequence
  targeting sequence with TTCN PAM
ccuuuaaucuuugcaauugc

SEQ ID NO: 26161 - RNA, 20 nt, Artificial Sequence
  targeting sequence with TTCN PAM
uuuuucucuuuugugagucu

SEQ ID NO: 26162 - RNA, 20 nt, Artificial Sequence
  targeting sequence with TTCN PAM
cuuuugugagucuccuaguu

SEQ ID NO: 26163 - RNA, 20 nt, Artificial Sequence
  targeting sequence with TTCN PAM
cugucgcccagguuggagug

SEQ ID NO: 26164 - RNA, 20 nt, Artificial Sequence
  targeting sequence with TTCN PAM
accucagccucccaagcagc

SEQ ID NO: 26165 - RNA, 20 nt, Artificial Sequence
  targeting sequence with TTCN PAM
guagagacgggguuucgcca

SEQ ID NO: 26166 - RNA, 20 nt, Artificial Sequence
  targeting sequence with TTCN PAM
ccauguuacccaggcugguc

SEQ ID NO: 26167 - RNA, 20 nt, Artificial Sequence
  targeting sequence with TTCN PAM
agaccagccuggguaacaug

SEQ ID NO: 26168 - RNA, 20 nt, Artificial Sequence
  targeting sequence with TTCN PAM
uggauugaagugaucuuccu

SEQ ID NO: 26169 - RNA, 20 nt, Artificial Sequence
  targeting sequence with TTCN PAM
auccaggaauucaagaccag

SEQ ID NO: 26170 - RNA, 20 nt, Artificial Sequence
  targeting sequence with TTCN PAM
ugccuuggccucccaaagug

SEQ ID NO: 26171 - RNA, 20 nt, Artificial Sequence
  targeting sequence with TTCN PAM
uuucuuuauguccacuuucc

SEQ ID NO: 26172 - RNA, 20 nt, Artificial Sequence
  targeting sequence with TTCN PAM
uuauguccacuuucccaauu

SEQ ID NO: 26173 - RNA, 20 nt, Artificial Sequence
  targeting sequence with TTCN PAM
caauuuuauauauuuugaca

SEQ ID NO: 26174 - RNA, 20 nt, Artificial Sequence
  targeting sequence with TTCN PAM
cuguuuucaguauauuuaug

SEQ ID NO: 26175 - RNA, 20 nt, Artificial Sequence
  targeting sequence with TTCN PAM
guauauuuaugauguuuuuc

SEQ ID NO: 26176 - RNA, 20 nt, Artificial Sequence
  targeting sequence with TTCN PAM
uaugacaucacagaaauggg

SEQ ID NO: 26177 - RNA, 20 nt, Artificial Sequence
  targeting sequence with TTCN PAM
gugaugucauaggaaaaaca

SEQ ID NO: 26178 - RNA, 20 nt, Artificial Sequence
  targeting sequence with TTCN PAM
uauuucauacaucuagguuc

SEQ ID NO: 26179 - RNA, 20 nt, Artificial Sequence
  targeting sequence with TTCN PAM
uacaucuagguuccugccau

SEQ ID NO: 26180 - RNA, 20 nt, Artificial Sequence
  targeting sequence with TTCN PAM
ugccauuucccuggcucaag

SEQ ID NO: 26181 - RNA, 20 nt, Artificial Sequence
  targeting sequence with TTCN PAM
cuggcucaaguuugccagau

SEQ ID NO: 26182 - RNA, 20 nt, Artificial Sequence
  targeting sequence with TTCN PAM
aauaguuccaugcacuggcc

SEQ ID NO: 26183 - RNA, 20 nt, Artificial Sequence
  targeting sequence with TTCN PAM
augcacuggccauuuccaaa

SEQ ID NO: 26184 - RNA, 20 nt, Artificial Sequence
  targeting sequence with TTCN PAM
aaacuuuccuuuguacuggu

SEQ ID NO: 26185 - RNA, 20 nt, Artificial Sequence
  targeting sequence with TTCN PAM
uuuguacuggugaaacuauc

SEQ ID NO: 26186 - RNA, 20 nt, Artificial Sequence
  targeting sequence with TTCN PAM
ccaguacaaaggaaaguuug

SEQ ID NO: 26187 - RNA, 20 nt, Artificial Sequence
  targeting sequence with TTCN PAM
ucacacacauacauagguag

SEQ ID NO: 26188 - RNA, 20 nt, Artificial Sequence
  targeting sequence with TTCN PAM
gaggcauaaucauggugcac

SEQ ID NO: 26189 - RNA, 20 nt, Artificial Sequence
  targeting sequence with TTCN PAM
aaucuccaaaaagaguuaua

SEQ ID NO: 26190 - RNA, 20 nt, Artificial Sequence
  targeting sequence with TTCN PAM
auauaacucuuuuuggagau

SEQ ID NO: 26191 - RNA, 20 nt, Artificial Sequence
  targeting sequence with TTCN PAM
guaagagcauggugaggauu

SEQ ID NO: 26192 - RNA, 20 nt, Artificial Sequence
  targeting sequence with TTCN PAM
accucuaaaggacuuuauuu

SEQ ID NO: 26193 - RNA, 20 nt, Artificial Sequence
  targeting sequence with TTCN PAM
caguuacaugggaaauuaac

SEQ ID NO: 26194 - RNA, 20 nt, Artificial Sequence
  targeting sequence with TTCN PAM
cauguaacugugaauaaauu

SEQ ID NO: 26195 - RNA, 20 nt, Artificial Sequence
  targeting sequence with TTCN PAM
ucucaagcugagucuuccca

SEQ ID NO: 26196 - RNA, 20 nt, Artificial Sequence
  targeting sequence with TTCN PAM
caagcugagucuucccaaau

SEQ ID NO: 26197 - RNA, 20 nt, Artificial Sequence
  targeting sequence with TTCN PAM
caaauaagaaaauguaacua

SEQ ID NO: 26198 - RNA, 20 nt, Artificial Sequence
  targeting sequence with TTCN PAM
uauuugggaagacucagcuu

SEQ ID NO: 26199 - RNA, 20 nt, Artificial Sequence
  targeting sequence with TTCN PAM
cagagauaaugcuuuguuag

SEQ ID NO: 26200 - RNA, 20 nt, Artificial Sequence
  targeting sequence with TTCN PAM
acuuacccaaaugcugcuuu

SEQ ID NO: 26201 - RNA, 20 nt, Artificial Sequence
  targeting sequence with TTCN PAM
ucugcugagaucauucuacu

SEQ ID NO: 26202 - RNA, 20 nt, Artificial Sequence
  targeting sequence with TTCN PAM
ugcucugucacccagacugg

SEQ ID NO: 26203 - RNA, 20 nt, Artificial Sequence
  targeting sequence with TTCN PAM
guuuguuugagacagguucu

SEQ ID NO: 26204 - RNA, 20 nt, Artificial Sequence
  targeting sequence with TTCN PAM
gggacuccuguuuuuguuug

SEQ ID NO: 26205 - RNA, 20 nt, Artificial Sequence
  targeting sequence with TTCN PAM
gauccuuauuaaaccucacu

SEQ ID NO: 26206 - RNA, 20 nt, Artificial Sequence
  targeting sequence with TTCN PAM
gaccagcuugggcaacaugg

SEQ ID NO: 26207 - RNA, 20 nt, Artificial Sequence
  targeting sequence with TTCN PAM
ccauguugcccaagcugguc

SEQ ID NO: 26208 - RNA, 20 nt, Artificial Sequence
  targeting sequence with TTCN PAM
gcauggaaggcagaggugca

SEQ ID NO: 26209 - RNA, 20 nt, Artificial Sequence
  targeting sequence with TTCN PAM
augcugaagcaguccucuca

SEQ ID NO: 26210 - RNA, 20 nt, Artificial Sequence
  targeting sequence with TTCN PAM
cuuugagacaaggucuuacu

SEQ ID NO: 26211 - RNA, 20 nt, Artificial Sequence
  targeting sequence with TTCN PAM
guauuguuaaugaaaugcaa

SEQ ID NO: 26212 - RNA, 20 nt, Artificial Sequence
  targeting sequence with TTCN PAM
uuaacaauacagaauuuuuu

SEQ ID NO: 26213 - RNA, 20 nt, Artificial Sequence
  targeting sequence with TTCN PAM
uuauuugcauuucauuaaca

SEQ ID NO: 26214 - RNA, 20 nt, Artificial Sequence
  targeting sequence with TTCN PAM
uuucguuauuugcauuucau

SEQ ID NO: 26215 - RNA, 20 nt, Artificial Sequence
  targeting sequence with TTCN PAM
aguucccacugacuucccac

SEQ ID NO: 26216 - RNA, 20 nt, Artificial Sequence
  targeting sequence with TTCN PAM
cacugacuucccacuauccc

SEQ ID NO: 26217 - RNA, 20 nt, Artificial Sequence
  targeting sequence with TTCN PAM
cacuauccccauuacuaaua

SEQ ID NO: 26218 - RNA, 20 nt, Artificial Sequence
  targeting sequence with TTCN PAM
uagcacacuuuauuuucuag

SEQ ID NO: 26219 - RNA, 20 nt, Artificial Sequence
  targeting sequence with TTCN PAM
aguguuuacuuccugucuaa

SEQ ID NO: 26220 - RNA, 20 nt, Artificial Sequence
  targeting sequence with TTCN PAM
ugucuaaauucuaaaaugga

SEQ ID NO: 26221 - RNA, 20 nt, Artificial Sequence
  targeting sequence with TTCN PAM
aaaauggagaaaccagguac

SEQ ID NO: 26222 - RNA, 20 nt, Artificial Sequence
  targeting sequence with TTCN PAM
ccauuuuagaauuuagacag

SEQ ID NO: 26223 - RNA, 20 nt, Artificial Sequence
  targeting sequence with TTCN PAM
cauuaaauauuaacaccaag

SEQ ID NO: 26224 - RNA, 20 nt, Artificial Sequence
  targeting sequence with TTCN PAM
ccccuacuguuuggcuuggu

SEQ ID NO: 26225 - RNA, 20 nt, Artificial Sequence
  targeting sequence with TTCN PAM
cuuuuucuccccuacuguuu

SEQ ID NO: 26226 - RNA, 20 nt, Artificial Sequence
  targeting sequence with TTCN PAM
uaugugaaagucuuggguuu

SEQ ID NO: 26227 - RNA, 20 nt, Artificial Sequence
  targeting sequence with TTCN PAM
cauaugaaagucuauaaaac

SEQ ID NO: 26228 - RNA, 20 nt, Artificial Sequence
  targeting sequence with TTCN PAM
agguuuaaaaaaaacccaag

SEQ ID NO: 26229 - RNA, 20 nt, Artificial Sequence
  targeting sequence with TTCN PAM
uuaaagcagaguucuagguu

SEQ ID NO: 26230 - RNA, 20 nt, Artificial Sequence
  targeting sequence with TTCN PAM
auuuagcauccuguaaaggg

SEQ ID NO: 26231 - RNA, 20 nt, Artificial Sequence
  targeting sequence with TTCN PAM
uaaucauacaagaacaguca

SEQ ID NO: 26232 - RNA, 20 nt, Artificial Sequence
  targeting sequence with TTCN PAM
uguaugauuaagaaccuccc

SEQ ID NO: 26233 - RNA, 20 nt, Artificial Sequence
  targeting sequence with TTCN PAM
caagauguguccccaucauu

SEQ ID NO: 26234 - RNA, 20 nt, Artificial Sequence
  targeting sequence with TTCN PAM
cauagugauaaaauaacgua

SEQ ID NO: 26235 - RNA, 20 nt, Artificial Sequence
  targeting sequence with TTCN PAM
uaggcuacaaagcuguacag

SEQ ID NO: 26236 - RNA, 20 nt, Artificial Sequence
  targeting sequence with TTCN PAM
auguuuagauaugucuagau

SEQ ID NO: 26237 - RNA, 20 nt, Artificial Sequence
  targeting sequence with TTCN PAM
aagcagcugggauuacaggc

SEQ ID NO: 26238 - RNA, 20 nt, Artificial Sequence
  targeting sequence with TTCN PAM
agcaauugucgugccucagc

SEQ ID NO: 26239 - RNA, 20 nt, Artificial Sequence
  targeting sequence with TTCN PAM
gugagccgagacuguaccac

SEQ ID NO: 26240 - RNA, 20 nt, Artificial Sequence
  targeting sequence with TTCN PAM
uaaguuuauaaugcuguuuu

SEQ ID NO: 26241 - RNA, 20 nt, Artificial Sequence
  targeting sequence with TTCN PAM
gcacaugacuaugugugauu

SEQ ID NO: 26242 - RNA, 20 nt, Artificial Sequence
  targeting sequence with TTCN PAM
cgcaccuccgcuuggauuac

SEQ ID NO: 26243 - RNA, 20 nt, Artificial Sequence
  targeting sequence with TTCN PAM
uaaauuguuacaacccaaag

SEQ ID NO: 26244 - RNA, 20 nt, Artificial Sequence
  targeting sequence with TTCN PAM
cuuuggguuguaacaauuua

SEQ ID NO: 26245 - RNA, 20 nt, Artificial Sequence
  targeting sequence with TTCN PAM
guuugcugauaguuaagcuc

SEQ ID NO: 26246 - RNA, 20 nt, Artificial Sequence
  targeting sequence with TTCN PAM
aaaagcaaguaucauauuuu

SEQ ID NO: 26247 - RNA, 20 nt, Artificial Sequence
  targeting sequence with TTCN PAM
ucuaccaaaauaugauacuu

SEQ ID NO: 26248 - RNA, 20 nt, Artificial Sequence
  targeting sequence with TTCN PAM
ucccccacuggaagcaaaac

SEQ ID NO: 26249 - RNA, 20 nt, Artificial Sequence
  targeting sequence with TTCN PAM
agugggggaugaauuucauc

SEQ ID NO: 26250 - RNA, 20 nt, Artificial Sequence
  targeting sequence with TTCN PAM
aucuacaaaguauuaaacac

SEQ ID NO: 26251 - RNA, 20 nt, Artificial Sequence
  targeting sequence with TTCN PAM
uaaauaaauacuaaacuuga

SEQ ID NO: 26252 - RNA, 20 nt, Artificial Sequence
  targeting sequence with TTCN PAM
aguuuaguauuuauuuauga

SEQ ID NO: 26253 - RNA, 20 nt, Artificial Sequence
  targeting sequence with TTCN PAM
uagaucagagaugagccagg

SEQ ID NO: 26254 - RNA, 20 nt, Artificial Sequence
  targeting sequence with TTCN PAM
ucaguaauuugacacaaaag

SEQ ID NO: 26255 - RNA, 20 nt, Artificial Sequence
  targeting sequence with TTCN PAM
caggcuguguacucacccag

SEQ ID NO: 26256 - RNA, 20 nt, Artificial Sequence
  targeting sequence with TTCN PAM
ggucaaagcauucccaggcu

SEQ ID NO: 26257 - RNA, 20 nt, Artificial Sequence
  targeting sequence with TTCN PAM
ucuuuggguguggcucaaaa

SEQ ID NO: 26258 - RNA, 20 nt, Artificial Sequence
  targeting sequence with TTCN PAM
cagagauggcuccaaacuuu

SEQ ID NO: 26259 - RNA, 20 nt, Artificial Sequence
  targeting sequence with TTCN PAM
cuaguucggcaauaggucac

SEQ ID NO: 26260 - RNA, 20 nt, Artificial Sequence
  targeting sequence with TTCN PAM
gcaauaggucacuagcacag

SEQ ID NO: 26261 - RNA, 20 nt, Artificial Sequence
  targeting sequence with TTCN PAM
gcuauccugugcuagugacc

SEQ ID NO: 26262 - RNA, 20 nt, Artificial Sequence
  targeting sequence with TTCN PAM
ucagcuauccugugcuagug

SEQ ID NO: 26263 - RNA, 20 nt, Artificial Sequence
  targeting sequence with TTCN PAM
cucaauaccugcuccacaag

SEQ ID NO: 26264 - RNA, 20 nt, Artificial Sequence
  targeting sequence with TTCN PAM
uguuucucucaauaccugcu

SEQ ID NO: 26265 - RNA, 20 nt, Artificial Sequence
  targeting sequence with TTCN PAM
uccuguuucucucaauaccu

SEQ ID NO: 26266 - RNA, 20 nt, Artificial Sequence
  targeting sequence with TTCN PAM
ugggaccuaguucuuccugu

SEQ ID NO: 26267 - RNA, 20 nt, Artificial Sequence
  targeting sequence with TTCN PAM
cccauaguugccugugggug

SEQ ID NO: 26268 - RNA, 20 nt, Artificial Sequence
  targeting sequence with TTCN PAM
ucucccauaguugccugugg

SEQ ID NO: 26269 - RNA, 20 nt, Artificial Sequence
  targeting sequence with TTCN PAM
caaaugcauaccagagaccc

SEQ ID NO: 26270 - RNA, 20 nt, Artificial Sequence
  targeting sequence with TTCN PAM
gccaguguuugaccagagua

SEQ ID NO: 26271 - RNA, 20 nt, Artificial Sequence
  targeting sequence with TTCN PAM
aacucccaccgcaagucaua

SEQ ID NO: 26272 - RNA, 20 nt, Artificial Sequence
  targeting sequence with TTCN PAM
uagcugaauuggggagagug

SEQ ID NO: 26273 - RNA, 20 nt, Artificial Sequence
  targeting sequence with TTCN PAM
gcuaggaaccuauucaaacu

SEQ ID NO: 26274 - RNA, 20 nt, Artificial Sequence
  targeting sequence with TTCN PAM
ccuuaccuuuuguuaccuuu

SEQ ID NO: 26275 - RNA, 20 nt, Artificial Sequence
  targeting sequence with TTCN PAM
acacaaaaaagguaacaaaa

SEQ ID NO: 26276 - RNA, 20 nt, Artificial Sequence
  targeting sequence with TTCN PAM
ggcuucaacacaaaaaaggu

SEQ ID NO: 26277 - RNA, 20 nt, Artificial Sequence
  targeting sequence with TTCN PAM
uuucaggcuucaacacaaaa

SEQ ID NO: 26278 - RNA, 20 nt, Artificial Sequence
  targeting sequence with TTCN PAM
guguuuuuuagcuucuuuuc

SEQ ID NO: 26279 - RNA, 20 nt, Artificial Sequence
  targeting sequence with TTCN PAM
gcugaaaagggaaaaagaua

SEQ ID NO: 26280 - RNA, 20 nt, Artificial Sequence
  targeting sequence with TTCN PAM
gcugaaggcuaguucagugu

SEQ ID NO: 26281 - RNA, 20 nt, Artificial Sequence
  targeting sequence with TTCN PAM
cuuuucagcugaaggcuagu

SEQ ID NO: 26282 - RNA, 20 nt, Artificial Sequence
  targeting sequence with TTCN PAM
aggguaggcaaugaauuauc

SEQ ID NO: 26283 - RNA, 20 nt, Artificial Sequence
  targeting sequence with TTCN PAM
uugccuacccuugaaauauu

SEQ ID NO: 26284 - RNA, 20 nt, Artificial Sequence
  targeting sequence with TTCN PAM
ugucauuaagauaauucauu

SEQ ID NO: 26285 - RNA, 20 nt, Artificial Sequence
  targeting sequence with TTCN PAM
uguauuauuuagauauuuac

SEQ ID NO: 26286 - RNA, 20 nt, Artificial Sequence
  targeting sequence with TTCN PAM
gggcaacuugcagacuuggu

SEQ ID NO: 26287 - RNA, 20 nt, Artificial Sequence
  targeting sequence with TTCN PAM
aacauucuggcacaacccag

SEQ ID NO: 26288 - RNA, 20 nt, Artificial Sequence
  targeting sequence with TTCN PAM
ggcacaacccagaucuuugu

SEQ ID NO: 26289 - RNA, 20 nt, Artificial Sequence
  targeting sequence with TTCN PAM
ccuagaaaaaauggaggagg

SEQ ID NO: 26290 - RNA, 20 nt, Artificial Sequence
  targeting sequence with TTCN PAM
aggggaauacaaagaucugg

SEQ ID NO: 26291 - RNA, 20 nt, Artificial Sequence
  targeting sequence with TTCN PAM
auauauguuaucuccuuuaa

SEQ ID NO: 26292 - RNA, 20 nt, Artificial Sequence
  targeting sequence with TTCN PAM
acaaccauguacaauaaaua

SEQ ID NO: 26293 - RNA, 20 nt, Artificial Sequence
  targeting sequence with TTCN PAM
cccucuguaaaaauguaaug

SEQ ID NO: 26294 - RNA, 20 nt, Artificial Sequence
  targeting sequence with TTCN PAM
aguuuguccacuccaaggaa

SEQ ID NO: 26295 - RNA, 20 nt, Artificial Sequence
  targeting sequence with TTCN PAM
uuggaguggacaaacuugaa

SEQ ID NO: 26296 - RNA, 20 nt, Artificial Sequence
  targeting sequence with TTCN PAM
ucuuuagcggcuaaacgcua

SEQ ID NO: 26297 - RNA, 20 nt, Artificial Sequence
  targeting sequence with TTCN PAM
auaaaagagauuuaugggug

SEQ ID NO: 26298 - RNA, 20 nt, Artificial Sequence
  targeting sequence with TTCN PAM
uaauugggauuuugcuucuc

SEQ ID NO: 26299 - RNA, 20 nt, Artificial Sequence
  targeting sequence with TTCN PAM
cucauaaaugaagggcuaau

SEQ ID NO: 26300 - RNA, 20 nt, Artificial Sequence
  targeting sequence with TTCN PAM
uuuaugagagaagcaaaauc

SEQ ID NO: 26301 - RNA, 20 nt, Artificial Sequence
  targeting sequence with TTCN PAM
guacccucaguuucuauuuc

SEQ ID NO: 26302 - RNA, 20 nt, Artificial Sequence
  targeting sequence with TTCN PAM
auuucaaacuuauuguccaa

SEQ ID NO: 26303 - RNA, 20 nt, Artificial Sequence
  targeting sequence with TTCN PAM
aacuuauuguccaaaucuag

SEQ ID NO: 26304 - RNA, 20 nt, Artificial Sequence
  targeting sequence with TTCN PAM
cagaucacuuuucaguugac

SEQ ID NO: 26305 - RNA, 20 nt, Artificial Sequence
  targeting sequence with TTCN PAM
guugacaggucucacacaua

SEQ ID NO: 26306 - RNA, 20 nt, Artificial Sequence
  targeting sequence with TTCN PAM
augugugagaccugucaacu

SEQ ID NO: 26307 - RNA, 20 nt, Artificial Sequence
  targeting sequence with TTCN PAM
aacuaaacaaaugguuguuu

SEQ ID NO: 26308 - RNA, 20 nt, Artificial Sequence
  targeting sequence with TTCN PAM
acugcaugugacaacugcuc

SEQ ID NO: 26309 - RNA, 20 nt, Artificial Sequence
  targeting sequence with TTCN PAM
cagaagccgauuuccaaugg

SEQ ID NO: 26310 - RNA, 20 nt, Artificial Sequence
  targeting sequence with TTCN PAM
gagaaaguuuguauuaaacc

SEQ ID NO: 26311 - RNA, 20 nt, Artificial Sequence
  targeting sequence with TTCN PAM
aauggacaguaauccccuuc

SEQ ID NO: 26312 - RNA, 20 nt, Artificial Sequence
  targeting sequence with TTCN PAM
aauacaagcuuucaaaaugg

SEQ ID NO: 26313 - RNA, 20 nt, Artificial Sequence
  targeting sequence with TTCN PAM
aaauggcauuaaugcucauc

SEQ ID NO: 26314 - RNA, 20 nt, Artificial Sequence
  targeting sequence with TTCN PAM
aggccagauccccuaagaaa

SEQ ID NO: 26315 - RNA, 20 nt, Artificial Sequence
  targeting sequence with TTCN PAM
uaggggaucuggccuggaau

SEQ ID NO: 26316 - RNA, 20 nt, Artificial Sequence
  targeting sequence with TTCN PAM
uugguaguuuuuuucuuagg

SEQ ID NO: 26317 - RNA, 20 nt, Artificial Sequence
  targeting sequence with TTCN PAM
caauuaauguuuuccuagcu

SEQ ID NO: 26318 - RNA, 20 nt, Artificial Sequence
  targeting sequence with TTCN PAM
uagcucucucuuauuuucag

SEQ ID NO: 26319 - RNA, 20 nt, Artificial Sequence
  targeting sequence with TTCN PAM
guacauuuugccacagcuga

SEQ ID NO: 26320 - RNA, 20 nt, Artificial Sequence
  targeting sequence with TTCN PAM
gcuguggcaaaauguacuga

SEQ ID NO: 26321 - RNA, 20 nt, Artificial Sequence
  targeting sequence with TTCN PAM
uuuugguagccuauuaauau

SEQ ID NO: 26322 - RNA, 20 nt, Artificial Sequence
  targeting sequence with TTCN PAM
uguagugaguguaaauauau

SEQ ID NO: 26323 - RNA, 20 nt, Artificial Sequence
  targeting sequence with TTCN PAM
agcagcaaauuaaauauaug

SEQ ID NO: 26324 - RNA, 20 nt, Artificial Sequence
  targeting sequence with TTCN PAM
gagcuucaguguucucaacu

SEQ ID NO: 26325 - RNA, 20 nt, Artificial Sequence
  targeting sequence with TTCN PAM
guguucucaacuguaaauaa

SEQ ID NO: 26326 - RNA, 20 nt, Artificial Sequence
  targeting sequence with TTCN PAM
caacuguaaauaagauuaau

SEQ ID NO: 26327 - RNA, 20 nt, Artificial Sequence
  targeting sequence with TTCN PAM
acuucugaaguacugugaac

SEQ ID NO: 26328 - RNA, 20 nt, Artificial Sequence
  targeting sequence with TTCN PAM
gaaguacugugaacccagcu

SEQ ID NO: 26329 - RNA, 20 nt, Artificial Sequence
  targeting sequence with TTCN PAM
gaaguagaagggacccuuag

SEQ ID NO: 26330 - RNA, 20 nt, Artificial Sequence
  targeting sequence with TTCN PAM
caguacuucagaaguagaag

SEQ ID NO: 26331 - RNA, 20 nt, Artificial Sequence
  targeting sequence with TTCN PAM
ucccauguuuuguuaguggc

SEQ ID NO: 26332 - RNA, 20 nt, Artificial Sequence
  targeting sequence with TTCN PAM
ucaucccauguuuuguuagu

SEQ ID NO: 26333 - RNA, 20 nt, Artificial Sequence
  targeting sequence with TTCN PAM
uguccaguuaguuucuucau

SEQ ID NO: 26334 - RNA, 20 nt, Artificial Sequence
  targeting sequence with TTCN PAM
gauucuuguccaguuaguuu

SEQ ID NO: 26335 - RNA, 20 nt, Artificial Sequence
  targeting sequence with TTCN PAM
aaaccuugucuccugccuuc

SEQ ID NO: 26336 - RNA, 20 nt, Artificial Sequence
  targeting sequence with TTCN PAM
ccaaauacaugaucucacuc

SEQ ID NO: 26337 - RNA, 20 nt, Artificial Sequence
  targeting sequence with TTCN PAM
gcuaugagugagaucaugua

SEQ ID NO: 26338 - RNA, 20 nt, Artificial Sequence
  targeting sequence with TTCN PAM
gauccaagcucugcuacaau

SEQ ID NO: 26339 - RNA, 20 nt, Artificial Sequence
  targeting sequence with TTCN PAM
ugggcuaagugcaugugggc

SEQ ID NO: 26340 - RNA, 20 nt, Artificial Sequence
  targeting sequence with TTCN PAM
uugcccacaugcacuuagcc

SEQ ID NO: 26341 - RNA, 20 nt, Artificial Sequence
  targeting sequence with TTCN PAM
cccacauaauuguaccauga

SEQ ID NO: 26342 - RNA, 20 nt, Artificial Sequence
  targeting sequence with TTCN PAM
aaagccuauagagcacaguc

SEQ ID NO: 26343 - RNA, 20 nt, Artificial Sequence
  targeting sequence with TTCN PAM
gauuauuccagaguuaggca

SEQ ID NO: 26344 - RNA, 20 nt, Artificial Sequence
  targeting sequence with TTCN PAM
agaguuaggcagauggucuu

SEQ ID NO: 26345 - RNA, 20 nt, Artificial Sequence
  targeting sequence with TTCN PAM
cuuggagcuacucacuuggg

SEQ ID NO: 26346 - RNA, 20 nt, Artificial Sequence
  targeting sequence with TTCN PAM
auugcugucuacccaaguga

SEQ ID NO: 26347 - RNA, 20 nt, Artificial Sequence
  targeting sequence with TTCN PAM
cuuaauguguuuccauugcu

SEQ ID NO: 26348 - RNA, 20 nt, Artificial Sequence
  targeting sequence with TTCN PAM
caauaauguccuucgcuuaa

SEQ ID NO: 26349 - RNA, 20 nt, Artificial Sequence
  targeting sequence with TTCN PAM
gagaaggggaaauaaugacc

SEQ ID NO: 26350 - RNA, 20 nt, Artificial Sequence
  targeting sequence with TTCN PAM
cagaaucccuucucaauaau

SEQ ID NO: 26351 - RNA, 20 nt, Artificial Sequence
  targeting sequence with TTCN PAM
ccuucucagaaucccuucuc

SEQ ID NO: 26352 - RNA, 20 nt, Artificial Sequence
  targeting sequence with TTCN PAM
gucauuauuuccccuucuca

SEQ ID NO: 26353 - RNA, 20 nt, Artificial Sequence
  targeting sequence with TTCN PAM
uuaagaagguuucaccuauu

SEQ ID NO: 26354 - RNA, 20 nt, Artificial Sequence
  targeting sequence with TTCN PAM
uaaggaaaucccuacuucgg

SEQ ID NO: 26355 - RNA, 20 nt, Artificial Sequence
  targeting sequence with TTCN PAM
ccuauuuauuuacacugcug

SEQ ID NO: 26356 - RNA, 20 nt, Artificial Sequence
  targeting sequence with TTCN PAM
uaggccaguacagcagugua

SEQ ID NO: 26357 - RNA, 20 nt, Artificial Sequence
  targeting sequence with TTCN PAM
agagcuugcauauucauagc

SEQ ID NO: 26358 - RNA, 20 nt, Artificial Sequence
  targeting sequence with TTCN PAM
uagcauuuuuauaaaauaug

SEQ ID NO: 26359 - RNA, 20 nt, Artificial Sequence
  targeting sequence with TTCN PAM
acuugggauaggccuaauac

SEQ ID NO: 26360 - RNA, 20 nt, Artificial Sequence
  targeting sequence with TTCN PAM
gagagcuaggcuuucaacca

SEQ ID NO: 26361 - RNA, 20 nt, Artificial Sequence
  targeting sequence with TTCN PAM
accauauagauuucgggauu

SEQ ID NO: 26362 - RNA, 20 nt, Artificial Sequence
  targeting sequence with TTCN PAM
ggauugagcuuugaaaaaaa

SEQ ID NO: 26363 - RNA, 20 nt, Artificial Sequence
  targeting sequence with TTCN PAM
aagcucaaucccgaaaucua

SEQ ID NO: 26364 - RNA, 20 nt, Artificial Sequence
  targeting sequence with TTCN PAM
uaccaggaugauuuuuuuca

SEQ ID NO: 26365 - RNA, 20 nt, Artificial Sequence
  targeting sequence with TTCN PAM
guguuauuuucauaccagga

SEQ ID NO: 26366 - RNA, 20 nt, Artificial Sequence
  targeting sequence with TTCN PAM
aauucaguguuauuuucaua

SEQ ID NO: 26367 - RNA, 20 nt, Artificial Sequence
  targeting sequence with TTCN PAM
aaacccaguuuugucugacu

SEQ ID NO: 26368 - RNA, 20 nt, Artificial Sequence
  targeting sequence with TTCN PAM
auuuccucaucuuuaaaaug

SEQ ID NO: 26369 - RNA, 20 nt, Artificial Sequence
  targeting sequence with TTCN PAM
ucaucuuuaaaaugggaaua

SEQ ID NO: 26370 - RNA, 20 nt, Artificial Sequence
  targeting sequence with TTCN PAM
cauuuuaaagaugaggaaau

SEQ ID NO: 26371 - RNA, 20 nt, Artificial Sequence
  targeting sequence with TTCN PAM
ugguaguggccuugucacca

SEQ ID NO: 26372 - RNA, 20 nt, Artificial Sequence
  targeting sequence with TTCN PAM
acgcuuuaguuuauuuuacu

SEQ ID NO: 26373 - RNA, 20 nt, Artificial Sequence
  targeting sequence with TTCN PAM
uggucacagaaggaucugug

SEQ ID NO: 26374 - RNA, 20 nt, Artificial Sequence
  targeting sequence with TTCN PAM
gugaccaagaaccaguuaau

SEQ ID NO: 26375 - RNA, 20 nt, Artificial Sequence
  targeting sequence with TTCN PAM
cagauccuucugugaccaag

SEQ ID NO: 26376 - RNA, 20 nt, Artificial Sequence
  targeting sequence with TTCN PAM
uccuacacaaaaagcaaagc

SEQ ID NO: 26377 - RNA, 20 nt, Artificial Sequence
  targeting sequence with TTCN PAM
uacacaaaaagcaaagccua

SEQ ID NO: 26378 - RNA, 20 nt, Artificial Sequence
  targeting sequence with TTCN PAM
acucuguuguaggcuuugcu

SEQ ID NO: 26379 - RNA, 20 nt, Artificial Sequence
  targeting sequence with TTCN PAM
acuucuacucuguuguaggc

SEQ ID NO: 26380 - RNA, 20 nt, Artificial Sequence
  targeting sequence with TTCN PAM
ccacacuguuagugagcuac

SEQ ID NO: 26381 - RNA, 20 nt, Artificial Sequence
  targeting sequence with TTCN PAM
ucuccacacuguuagugagc

SEQ ID NO: 26382 - RNA, 20 nt, Artificial Sequence
  targeting sequence with TTCN PAM
auuucuucuccacacuguua

SEQ ID NO: 26383 - RNA, 20 nt, Artificial Sequence
  targeting sequence with TTCN PAM
ccuuuccauuucuucuccac

SEQ ID NO: 26384 - RNA, 20 nt, Artificial Sequence
  targeting sequence with TTCN PAM
guuugucugcuuuuuuuaua

SEQ ID NO: 26385 - RNA, 20 nt, Artificial Sequence
  targeting sequence with TTCN PAM
cuaaccugagaguaucacuc

SEQ ID NO: 26386 - RNA, 20 nt, Artificial Sequence
  targeting sequence with TTCN PAM
gcuuagagugauacucucag

SEQ ID NO: 26387 - RNA, 20 nt, Artificial Sequence
  targeting sequence with TTCN PAM
auuaaguuagauucagugua

SEQ ID NO: 26388 - RNA, 20 nt, Artificial Sequence
  targeting sequence with TTCN PAM
guguacuuuguaaaagaagg

SEQ ID NO: 26389 - RNA, 20 nt, Artificial Sequence
  targeting sequence with TTCN PAM
uuuacaaaguacacugaauc

SEQ ID NO: 26390 - RNA, 20 nt, Artificial Sequence
  targeting sequence with TTCN PAM
cugccuucuuuuacaaagua

SEQ ID NO: 26391 - RNA, 20 nt, Artificial Sequence
  targeting sequence with TTCN PAM
ccaaaaugcuuaaaauguga

SEQ ID NO: 26392 - RNA, 20 nt, Artificial Sequence
  targeting sequence with TTCN PAM
cauuuuaagcauuuugggga

SEQ ID NO: 26393 - RNA, 20 nt, Artificial Sequence
  targeting sequence with TTCN PAM
gugcuuaaaauagguuucug

SEQ ID NO: 26394 - RNA, 20 nt, Artificial Sequence
  targeting sequence with TTCN PAM
ggccgggcaugguggcucau

SEQ ID NO: 26395 - RNA, 20 nt, Artificial Sequence
  targeting sequence with TTCN PAM
agaccagccuggcuaacaug

SEQ ID NO: 26396 - RNA, 20 nt, Artificial Sequence
  targeting sequence with TTCN PAM
ccugccuuagccuccccagu

SEQ ID NO: 26397 - RNA, 20 nt, Artificial Sequence
  targeting sequence with TTCN PAM
agugauucuccugccuuagc

SEQ ID NO: 26398 - RNA, 20 nt, Artificial Sequence
  targeting sequence with TTCN PAM
cucuuguugcccaggcugga

SEQ ID NO: 26399 - RNA, 20 nt, Artificial Sequence
  targeting sequence with TTCN PAM
uuguuuuuggagacagaguu

SEQ ID NO: 26400 - RNA, 20 nt, Artificial Sequence
  targeting sequence with TTCN PAM
uuuuguuuuuuuguucuuug

SEQ ID NO: 26401 - RNA, 20 nt, Artificial Sequence
  targeting sequence with TTCN PAM
aagccaggcaugguggcaug

SEQ ID NO: 26402 - RNA, 20 nt, Artificial Sequence
  targeting sequence with TTCN PAM
accucagccuccugaguagc

SEQ ID NO: 26403 - RNA, 20 nt, Artificial Sequence
  targeting sequence with TTCN PAM
agaccagcaaggcaacauag

SEQ ID NO: 26404 - RNA, 20 nt, Artificial Sequence
  targeting sequence with TTCN PAM
agcaauucuccugccucagc

SEQ ID NO: 26405 - RNA, 20 nt, Artificial Sequence
  targeting sequence with TTCN PAM
ccugccucagccucccccgu

SEQ ID NO: 26406 - RNA, 20 nt, Artificial Sequence
  targeting sequence with TTCN PAM
ccauguuagccaggaugguc

SEQ ID NO: 26407 - RNA, 20 nt, Artificial Sequence
  targeting sequence with TTCN PAM
gaccuugugauccacccacc

SEQ ID NO: 26408 - RNA, 20 nt, Artificial Sequence
  targeting sequence with TTCN PAM
cuuuucuguuagaacuuuug

SEQ ID NO: 26409 - RNA, 20 nt, Artificial Sequence
  targeting sequence with TTCN PAM
guuagaacuuuuggagccca

SEQ ID NO: 26410 - RNA, 20 nt, Artificial Sequence
  targeting sequence with TTCN PAM
aacagaaaagggaauaugug

SEQ ID NO: 26411 - RNA, 20 nt, Artificial Sequence
  targeting sequence with TTCN PAM
gggcuccaaaaguucuaaca

SEQ ID NO: 26412 - RNA, 20 nt, Artificial Sequence
  targeting sequence with TTCN PAM
uugaaguugcaaucagggua

SEQ ID NO: 26413 - RNA, 20 nt, Artificial Sequence
  targeting sequence with TTCN PAM
aggaaaagaucuuuucuggg

SEQ ID NO: 26414 - RNA, 20 nt, Artificial Sequence
  targeting sequence with TTCN PAM
aacagauaaugugcaugagg

SEQ ID NO: 26415 - RNA, 20 nt, Artificial Sequence
  targeting sequence with TTCN PAM
acacuccuuagaaaugauuc

SEQ ID NO: 26416 - RNA, 20 nt, Artificial Sequence
  targeting sequence with TTCN PAM
aaggaguguagaagccuaau

SEQ ID NO: 26417 - RNA, 20 nt, Artificial Sequence
  targeting sequence with TTCN PAM
cuauaaacuuuucuucacaa

SEQ ID NO: 26418 - RNA, 20 nt, Artificial Sequence
  targeting sequence with TTCN PAM
ucacaaguuuccacugaaca

SEQ ID NO: 26419 - RNA, 20 nt, Artificial Sequence
  targeting sequence with TTCN PAM
caaguuuccacugaacauaa

SEQ ID NO: 26420 - RNA, 20 nt, Artificial Sequence
  targeting sequence with TTCN PAM
acugaacauaaaauacauuc

SEQ ID NO: 26421 - RNA, 20 nt, Artificial Sequence
  targeting sequence with TTCN PAM
guggaaacuugugaagaaaa

SEQ ID NO: 26422 - RNA, 20 nt, Artificial Sequence
  targeting sequence with TTCN PAM
uccacccaucuaucaaucua

SEQ ID NO: 26423 - RNA, 20 nt, Artificial Sequence
  targeting sequence with TTCN PAM
acccaucuaucaaucuaaac

SEQ ID NO: 26424 - RNA, 20 nt, Artificial Sequence
  targeting sequence with TTCN PAM
ccacauauccuuagacuuca

SEQ ID NO: 26425 - RNA, 20 nt, Artificial Sequence
  targeting sequence with TTCN PAM
aacaaccaguucacauuuca

SEQ ID NO: 26426 - RNA, 20 nt, Artificial Sequence
  targeting sequence with TTCN PAM
cauuucauuaagaggaaaug

SEQ ID NO: 26427 - RNA, 20 nt, Artificial Sequence
  targeting sequence with TTCN PAM
uuaagaggaaaugagaauua

SEQ ID NO: 26428 - RNA, 20 nt, Artificial Sequence
  targeting sequence with TTCN PAM
ucuuaaugaaaugugaacug

SEQ ID NO: 26429 - RNA, 20 nt, Artificial Sequence
  targeting sequence with TTCN PAM
cauuuccucuuaaugaaaug

SEQ ID NO: 26430 - RNA, 20 nt, Artificial Sequence
  targeting sequence with TTCN PAM
ugggcuuacagagcucaaaa

SEQ ID NO: 26431 - RNA, 20 nt, Artificial Sequence
  targeting sequence with TTCN PAM
auuuuacuuaucugaaaaau

SEQ ID NO: 26432 - RNA, 20 nt, Artificial Sequence
  targeting sequence with TTCN PAM
gauaaguaaaauggaaaauu

SEQ ID NO: 26433 - RNA, 20 nt, Artificial Sequence
  targeting sequence with TTCN PAM
auaccuaaaauacagggagu

SEQ ID NO: 26434 - RNA, 20 nt, Artificial Sequence
  targeting sequence with TTCN PAM
uuuuuuuucucacucuuaca

SEQ ID NO: 26435 - RNA, 20 nt, Artificial Sequence
  targeting sequence with TTCN PAM
cacucuuacacaggagcuag

SEQ ID NO: 26436 - RNA, 20 nt, Artificial Sequence
  targeting sequence with TTCN PAM
uguuuguaguccuagcuccu

SEQ ID NO: 26437 - RNA, 20 nt, Artificial Sequence
  targeting sequence with TTCN PAM
cuguuacuguaauugucauc

SEQ ID NO: 26438 - RNA, 20 nt, Artificial Sequence
  targeting sequence with TTCN PAM
gagauacuuucucuguuacu

SEQ ID NO: 26439 - RNA, 20 nt, Artificial Sequence
  targeting sequence with TTCN PAM
uugucuuuucugaagacaaa

SEQ ID NO: 26440 - RNA, 20 nt, Artificial Sequence
  targeting sequence with TTCN PAM
gaagacaaauguuuuccuuu

SEQ ID NO: 26441 - RNA, 20 nt, Artificial Sequence
  targeting sequence with TTCN PAM
gaaaagacaaagaacuucag

SEQ ID NO: 26442 - RNA, 20 nt, Artificial Sequence
  targeting sequence with TTCN PAM
uuucuauauccaacccuguc

SEQ ID NO: 26443 - RNA, 20 nt, Artificial Sequence
  targeting sequence with TTCN PAM
auauccaacccuguccccau

SEQ ID NO: 26444 - RNA, 20 nt, Artificial Sequence
  targeting sequence with TTCN PAM
ccugccucggccucccaaag

SEQ ID NO: 26445 - RNA, 20 nt, Artificial Sequence
  targeting sequence with TTCN PAM
cgaccagccuggucaacaug

SEQ ID NO: 26446 - RNA, 20 nt, Artificial Sequence
  targeting sequence with TTCN PAM
ccugccucagccucccaagu

SEQ ID NO: 26447 - RNA, 20 nt, Artificial Sequence
  targeting sequence with TTCN PAM
agcgauucuccugccucagc

SEQ ID NO: 26448 - RNA, 20 nt, Artificial Sequence
  targeting sequence with TTCN PAM
gccucccagguucaagcgau

SEQ ID NO: 26449 - RNA, 20 nt, Artificial Sequence
  targeting sequence with TTCN PAM
agcacagagcagauagagag

SEQ ID NO: 26450 - RNA, 20 nt, Artificial Sequence
  targeting sequence with TTCN PAM
cuucaagcacagagcagaua

SEQ ID NO: 26451 - RNA, 20 nt, Artificial Sequence
  targeting sequence with TTCN PAM
uuauuuuccuguuaaaagua

SEQ ID NO: 26452 - RNA, 20 nt, Artificial Sequence
  targeting sequence with TTCN PAM
uguuaaaaguaaucuccuuc

SEQ ID NO: 26453 - RNA, 20 nt, Artificial Sequence
  targeting sequence with TTCN PAM
aguucucuguacuucuaaac

SEQ ID NO: 26454 - RNA, 20 nt, Artificial Sequence
  targeting sequence with TTCN PAM
cuguacuucuaaacuuucua

SEQ ID NO: 26455 - RNA, 20 nt, Artificial Sequence
  targeting sequence with TTCN PAM
aaacuuucuaauuuuuaugg

SEQ ID NO: 26456 - RNA, 20 nt, Artificial Sequence
  targeting sequence with TTCN PAM
aauuuuuaugguauauauau

SEQ ID NO: 26457 - RNA, 20 nt, Artificial Sequence
  targeting sequence with TTCN PAM
ugaacuccuuacagcaccca

SEQ ID NO: 26458 - RNA, 20 nt, Artificial Sequence
  targeting sequence with TTCN PAM
agaauguauaagauauaaga

SEQ ID NO: 26459 - RNA, 20 nt, Artificial Sequence
  targeting sequence with TTCN PAM
guugaggugaccaaucaucu

SEQ ID NO: 26460 - RNA, 20 nt, Artificial Sequence
  targeting sequence with TTCN PAM
cuuuggauuuaguaauuugg

SEQ ID NO: 26461 - RNA, 20 nt, Artificial Sequence
  targeting sequence with TTCN PAM
uaguccucuucuuauugacc

SEQ ID NO: 26462 - RNA, 20 nt, Artificial Sequence
  targeting sequence with TTCN PAM
uauugaccuaucugcagcau

SEQ ID NO: 26463 - RNA, 20 nt, Artificial Sequence
  targeting sequence with TTCN PAM
uuucuccuaugaagaauuuc

SEQ ID NO: 26464 - RNA, 20 nt, Artificial Sequence
  targeting sequence with TTCN PAM
ccuaugaagaauuuccauac

SEQ ID NO: 26465 - RNA, 20 nt, Artificial Sequence
  targeting sequence with TTCN PAM
uaggagaaaggaaacaucaa

SEQ ID NO: 26466 - RNA, 20 nt, Artificial Sequence
  targeting sequence with TTCN PAM
ucauaggagaaaggaaacau

SEQ ID NO: 26467 - RNA, 20 nt, Artificial Sequence
  targeting sequence with TTCN PAM
auacuugguuuuccaguaca

SEQ ID NO: 26468 - RNA, 20 nt, Artificial Sequence
  targeting sequence with TTCN PAM
aguacaccauccucucuaga

SEQ ID NO: 26469 - RNA, 20 nt, Artificial Sequence
  targeting sequence with TTCN PAM
ucuucucucauaggucaauc

SEQ ID NO: 26470 - RNA, 20 nt, Artificial Sequence
  targeting sequence with TTCN PAM
cucauaggucaaucuucuuc

SEQ ID NO: 26471 - RNA, 20 nt, Artificial Sequence
  targeting sequence with TTCN PAM
uccuuuucuucuucucccua

SEQ ID NO: 26472 - RNA, 20 nt, Artificial Sequence
  targeting sequence with TTCN PAM
uuuucuucuucucccuaauu

SEQ ID NO: 26473 - RNA, 20 nt, Artificial Sequence
  targeting sequence with TTCN PAM
ucuucucccuaauuacauuu

SEQ ID NO: 26474 - RNA, 20 nt, Artificial Sequence
  targeting sequence with TTCN PAM
ucucccuaauuacauuuucu

SEQ ID NO: 26475 - RNA, 20 nt, Artificial Sequence
  targeting sequence with TTCN PAM
cccuaauuacauuuucugcc

SEQ ID NO: 26476 - RNA, 20 nt, Artificial Sequence
  targeting sequence with TTCN PAM
gccuagaacuuucuccuuag

SEQ ID NO: 26477 - RNA, 20 nt, Artificial Sequence
  targeting sequence with TTCN PAM
aggcagaaaauguaauuagg

SEQ ID NO: 26478 - RNA, 20 nt, Artificial Sequence
  targeting sequence with TTCN PAM
ccuuaguauccuaugacucu

SEQ ID NO: 26479 - RNA, 20 nt, Artificial Sequence
  targeting sequence with TTCN PAM
acauucccacuuagauggcu

SEQ ID NO: 26480 - RNA, 20 nt, Artificial Sequence
  targeting sequence with TTCN PAM
cacuuagauggcugauggac

SEQ ID NO: 26481 - RNA, 20 nt, Artificial Sequence
  targeting sequence with TTCN PAM
gguguccaucagccaucuaa

SEQ ID NO: 26482 - RNA, 20 nt, Artificial Sequence
  targeting sequence with TTCN PAM
guuucagguguccaucagcc

SEQ ID NO: 26483 - RNA, 20 nt, Artificial Sequence
  targeting sequence with TTCN PAM
cacaaaaccugcccuccagc

SEQ ID NO: 26484 - RNA, 20 nt, Artificial Sequence
  targeting sequence with TTCN PAM
uccagcuguuuagguuaaaa

SEQ ID NO: 26485 - RNA, 20 nt, Artificial Sequence
  targeting sequence with TTCN PAM
agcuguuuagguuaaaaucc

SEQ ID NO: 26486 - RNA, 20 nt, Artificial Sequence
  targeting sequence with TTCN PAM
uucauaccuuacauccaacc

SEQ ID NO: 26487 - RNA, 20 nt, Artificial Sequence
  targeting sequence with TTCN PAM
uaccuuacauccaaccugcc

SEQ ID NO: 26488 - RNA, 20 nt, Artificial Sequence
  targeting sequence with TTCN PAM
ggcagguuggauguaaggua

SEQ ID NO: 26489 - RNA, 20 nt, Artificial Sequence
  targeting sequence with TTCN PAM
guuagcaucgccuucaaaau

SEQ ID NO: 26490 - RNA, 20 nt, Artificial Sequence
  targeting sequence with TTCN PAM
aaauacaucuaaaauccaac

SEQ ID NO: 26491 - RNA, 20 nt, Artificial Sequence
  targeting sequence with TTCN PAM
cuuguacuuuagucugaacc

SEQ ID NO: 26492 - RNA, 20 nt, Artificial Sequence
  targeting sequence with TTCN PAM
gacuaaaguacaagugaaga

SEQ ID NO: 26493 - RNA, 20 nt, Artificial Sequence
  targeting sequence with TTCN PAM
caacuggucuaucuugccca

SEQ ID NO: 26494 - RNA, 20 nt, Artificial Sequence
  targeting sequence with TTCN PAM
uaauacuacaaccagaauga

SEQ ID NO: 26495 - RNA, 20 nt, Artificial Sequence
  targeting sequence with TTCN PAM
gguuguaguauuaagaacag

SEQ ID NO: 26496 - RNA, 20 nt, Artificial Sequence
  targeting sequence with TTCN PAM
ucaaugaauuccugugauac

SEQ ID NO: 26497 - RNA, 20 nt, Artificial Sequence
  targeting sequence with TTCN PAM
augaauuccugugauacuau

SEQ ID NO: 26498 - RNA, 20 nt, Artificial Sequence
  targeting sequence with TTCN PAM
uugaagaauuuuaagcagag

SEQ ID NO: 26499 - RNA, 20 nt, Artificial Sequence
  targeting sequence with TTCN PAM
ugugauacuaugaaauacau

SEQ ID NO: 26500 - RNA, 20 nt, Artificial Sequence
  targeting sequence with TTCN PAM
uaguaucacaggaauucauu

SEQ ID NO: 26501 - RNA, 20 nt, Artificial Sequence
  targeting sequence with TTCN PAM
agggucaacuauguauuuca

SEQ ID NO: 26502 - RNA, 20 nt, Artificial Sequence
  targeting sequence with TTCN PAM
gaccuuuguuguucaagggu

SEQ ID NO: 26503 - RNA, 20 nt, Artificial Sequence
  targeting sequence with TTCN PAM
aauauauuggaaaauauuuu

SEQ ID NO: 26504 - RNA, 20 nt, Artificial Sequence
  targeting sequence with TTCN PAM
aauauauuggaaaaaauaug

SEQ ID NO: 26505 - RNA, 20 nt, Artificial Sequence
  targeting sequence with TTCN PAM
aaucuccaaaauauuuucca

SEQ ID NO: 26506 - RNA, 20 nt, Artificial Sequence
  targeting sequence with TTCN PAM
caaauuguuucaaaucucca

SEQ ID NO: 26507 - RNA, 20 nt, Artificial Sequence
  targeting sequence with TTCN PAM
uagguuaugcaauuugccau

SEQ ID NO: 26508 - RNA, 20 nt, Artificial Sequence
  targeting sequence with TTCN PAM
ugaaugaaugcauaaaacau

SEQ ID NO: 26509 - RNA, 20 nt, Artificial Sequence
  targeting sequence with TTCN PAM
cgaaucuuaauuuuuuggua

SEQ ID NO: 26510 - RNA, 20 nt, Artificial Sequence
  targeting sequence with TTCN PAM
uucacgaaucuuaauuuuuu

SEQ ID NO: 26511 - RNA, 20 nt, Artificial Sequence
  targeting sequence with TTCN PAM
gauuuguacauacuuuaugg

SEQ ID NO: 26512 - RNA, 20 nt, Artificial Sequence
  targeting sequence with TTCN PAM
aucaaaauuuauacaaacac

SEQ ID NO: 26513 - RNA, 20 nt, Artificial Sequence
  targeting sequence with TTCN PAM
cuugacugcaaauggcacca

SEQ ID NO: 26514 - RNA, 20 nt, Artificial Sequence
  targeting sequence with TTCN PAM
cagccaccuccaguugcuag

SEQ ID NO: 26515 - RNA, 20 nt, Artificial Sequence
  targeting sequence with TTCN PAM
cucacugcuagcaacuggag

SEQ ID NO: 26516 - RNA, 20 nt, Artificial Sequence
  targeting sequence with TTCN PAM
ucucuccaguaaacugcaua

SEQ ID NO: 26517 - RNA, 20 nt, Artificial Sequence
  targeting sequence with TTCN PAM
cuauuauuuuucacuguguu

SEQ ID NO: 26518 - RNA, 20 nt, Artificial Sequence
  targeting sequence with TTCN PAM
cuguguuuaguacaauacug

SEQ ID NO: 26519 - RNA, 20 nt, Artificial Sequence
  targeting sequence with TTCN PAM
agguuuacaguauuguacua

SEQ ID NO: 26520 - RNA, 20 nt, Artificial Sequence
  targeting sequence with TTCN PAM
uacgcaucucaugguauuau

SEQ ID NO: 26521 - RNA, 20 nt, Artificial Sequence
  targeting sequence with TTCN PAM
gugucacuagucucacuucu

SEQ ID NO: 26522 - RNA, 20 nt, Artificial Sequence
  targeting sequence with TTCN PAM
ugggagcacuucagugucac

SEQ ID NO: 26523 - RNA, 20 nt, Artificial Sequence
  targeting sequence with TTCN PAM
cugcuucuugggagcacuuc

SEQ ID NO: 26524 - RNA, 20 nt, Artificial Sequence
  targeting sequence with TTCN PAM
uguaaugucaugacauuuuc

SEQ ID NO: 26525 - RNA, 20 nt, Artificial Sequence
  targeting sequence with TTCN PAM
uacagaugauuugucuugua

SEQ ID NO: 26526 - RNA, 20 nt, Artificial Sequence
  targeting sequence with TTCN PAM
cuuccuuaugauuuuaguaa

SEQ ID NO: 26527 - RNA, 20 nt, Artificial Sequence
  targeting sequence with TTCN PAM
uuaugauuuuaguaacauuu

SEQ ID NO: 26528 - RNA, 20 nt, Artificial Sequence
  targeting sequence with TTCN PAM
uuaugauuuucuuaacauuu

SEQ ID NO: 26529 - RNA, 20 nt, Artificial Sequence
  targeting sequence with TTCN PAM
uaacauuuuauuuucucuag

SEQ ID NO: 26530 - RNA, 20 nt, Artificial Sequence
  targeting sequence with TTCN PAM
cuagcuuacuguauuguaag

SEQ ID NO: 26531 - RNA, 20 nt, Artificial Sequence
  targeting sequence with TTCN PAM
uacaauacaguaagcuagag

SEQ ID NO: 26532 - RNA, 20 nt, Artificial Sequence
  targeting sequence with TTCN PAM
gacucccccaaagcuuaacu

SEQ ID NO: 26533 - RNA, 20 nt, Artificial Sequence
  targeting sequence with TTCN PAM
ccuuuuccuggcauacaacu

SEQ ID NO: 26534 - RNA, 20 nt, Artificial Sequence
  targeting sequence with TTCN PAM
uggcauacaacuacuaaaau

SEQ ID NO: 26535 - RNA, 20 nt, Artificial Sequence
  targeting sequence with TTCN PAM
aaggauuuuaguaguuguau

SEQ ID NO: 26536 - RNA, 20 nt, Artificial Sequence
  targeting sequence with TTCN PAM
gggugaggcuggucaucaga

SEQ ID NO: 26537 - RNA, 20 nt, Artificial Sequence
  targeting sequence with TTCN PAM
gaugaccagccucacccuga

SEQ ID NO: 26538 - RNA, 20 nt, Artificial Sequence
  targeting sequence with TTCN PAM
cuaauuaugccuuggucuuu

SEQ ID NO: 26539 - RNA, 20 nt, Artificial Sequence
  targeting sequence with TTCN PAM
gccccaccccccaaccucug

SEQ ID NO: 26540 - RNA, 20 nt, Artificial Sequence
  targeting sequence with TTCN PAM
uuuacccucccagagguugg

SEQ ID NO: 26541 - RNA, 20 nt, Artificial Sequence
  targeting sequence with TTCN PAM
cucuccuuccuuuacccucc

SEQ ID NO: 26542 - RNA, 20 nt, Artificial Sequence
  targeting sequence with TTCN PAM
uuaugugggugugauugauu

SEQ ID NO: 26543 - RNA, 20 nt, Artificial Sequence
  targeting sequence with TTCN PAM
auaaaaacccaaaaggacag

SEQ ID NO: 26544 - RNA, 20 nt, Artificial Sequence
  targeting sequence with TTCN PAM
ggauagcugaacauguggag

SEQ ID NO: 26545 - RNA, 20 nt, Artificial Sequence
  targeting sequence with TTCN PAM
gcuauccagaagcucccuaa

SEQ ID NO: 26546 - RNA, 20 nt, Artificial Sequence
  targeting sequence with TTCN PAM
uggagggugggggcuuaaug

SEQ ID NO: 26547 - RNA, 20 nt, Artificial Sequence
  targeting sequence with TTCN PAM
auuaagcccccacccuccag

SEQ ID NO: 26548 - RNA, 20 nt, Artificial Sequence
  targeting sequence with TTCN PAM
cauaugccuugccuaugcau

SEQ ID NO: 26549 - RNA, 20 nt, Artificial Sequence
  targeting sequence with TTCN PAM
ucugcauccuuuauaauagg

SEQ ID NO: 26550 - RNA, 20 nt, Artificial Sequence
  targeting sequence with TTCN PAM
ugaauucuguaagccacucu

SEQ ID NO: 26551 - RNA, 20 nt, Artificial Sequence
  targeting sequence with TTCN PAM
agaaaacguguauacuggcc

SEQ ID NO: 26552 - RNA, 20 nt, Artificial Sequence
  targeting sequence with TTCN PAM
guaagccacucuagcaaauu

SEQ ID NO: 26553 - RNA, 20 nt, Artificial Sequence
  targeting sequence with TTCN PAM
guuaauuugcuagaguggcu

SEQ ID NO: 26554 - RNA, 20 nt, Artificial Sequence
  targeting sequence with TTCN PAM
acagcccccuccuuggauuc

SEQ ID NO: 26555 - RNA, 20 nt, Artificial Sequence
  targeting sequence with TTCN PAM
gaccaacuggcuguaaauug

SEQ ID NO: 26556 - RNA, 20 nt, Artificial Sequence
  targeting sequence with TTCN PAM
augggcauuggaaaugggau

SEQ ID NO: 26557 - RNA, 20 nt, Artificial Sequence
  targeting sequence with TTCN PAM
aaugcccauugaaagcccca

SEQ ID NO: 26558 - RNA, 20 nt, Artificial Sequence
  targeting sequence with TTCN PAM
gacucugucuaccuggagau

SEQ ID NO: 26559 - RNA, 20 nt, Artificial Sequence
  targeting sequence with TTCN PAM
auucugacucugucuaccug

SEQ ID NO: 26560 - RNA, 20 nt, Artificial Sequence
  targeting sequence with TTCN PAM
auucaauucugacucugucu

SEQ ID NO: 26561 - RNA, 20 nt, Artificial Sequence
  targeting sequence with TTCN PAM
gcagcagacaccagcugggu

SEQ ID NO: 26562 - RNA, 20 nt, Artificial Sequence
  targeting sequence with TTCN PAM
caccagcaagcaauucugca

SEQ ID NO: 26563 - RNA, 20 nt, Artificial Sequence
  targeting sequence with TTCN PAM
ucccaccagcaagcaauucu

SEQ ID NO: 26564 - RNA, 20 nt, Artificial Sequence
  targeting sequence with TTCN PAM
gaugccaggucuguggagau

SEQ ID NO: 26565 - RNA, 20 nt, Artificial Sequence
  targeting sequence with TTCN PAM
cccacuauccucucaacaac

SEQ ID NO: 26566 - RNA, 20 nt, Artificial Sequence
  targeting sequence with TTCN PAM
uuuacacucaaauggccuuc

SEQ ID NO: 26567 - RNA, 20 nt, Artificial Sequence
  targeting sequence with TTCN PAM
aaggcacaucugauuuggcc

SEQ ID NO: 26568 - RNA, 20 nt, Artificial Sequence
  targeting sequence with TTCN PAM
uuaugguagauuaauagcca

SEQ ID NO: 26569 - RNA, 20 nt, Artificial Sequence
  targeting sequence with TTCN PAM
uccaaucucguauacccuuc

SEQ ID NO: 26570 - RNA, 20 nt, Artificial Sequence
  targeting sequence with TTCN PAM
cuuuauaauuuggauuuccc

SEQ ID NO: 26571 - RNA, 20 nt, Artificial Sequence
  targeting sequence with TTCN PAM
cacuccugucaagagguggc

SEQ ID NO: 26572 - RNA, 20 nt, Artificial Sequence
  targeting sequence with TTCN PAM
ggccaggcacggugucucau

SEQ ID NO: 26573 - RNA, 20 nt, Artificial Sequence
  targeting sequence with TTCN PAM
uuuagggcucuccuaugaau

SEQ ID NO: 26574 - RNA, 20 nt, Artificial Sequence
  targeting sequence with TTCN PAM
uaggagagcccuaaaggaau

SEQ ID NO: 26575 - RNA, 20 nt, Artificial Sequence
  targeting sequence with TTCN PAM
uucugaucaccccacucacc

SEQ ID NO: 26576 - RNA, 20 nt, Artificial Sequence
  targeting sequence with TTCN PAM
gaucaccccacucacccugg

SEQ ID NO: 26577 - RNA, 20 nt, Artificial Sequence
  targeting sequence with TTCN PAM
uaauaaaauagauaaguaaa

SEQ ID NO: 26578 - RNA, 20 nt, Artificial Sequence
  targeting sequence with TTCN PAM
gagguuauaaaaggucaguu

SEQ ID NO: 26579 - RNA, 20 nt, Artificial Sequence
  targeting sequence with TTCN PAM
aaaccccugacacaucucug

SEQ ID NO: 26580 - RNA, 20 nt, Artificial Sequence
  targeting sequence with TTCN PAM
guuguuugcuauauaucuug

SEQ ID NO: 26581 - RNA, 20 nt, Artificial Sequence
  targeting sequence with TTCN PAM
auaucaaacuucacagugaa

SEQ ID NO: 26582 - RNA, 20 nt, Artificial Sequence
  targeting sequence with TTCN PAM
cagugaaaaaucuguuugga

SEQ ID NO: 26583 - RNA, 20 nt, Artificial Sequence
  targeting sequence with TTCN PAM
cugugaaguuugauauugaa

SEQ ID NO: 26584 - RNA, 20 nt, Artificial Sequence
  targeting sequence with TTCN PAM
uauuguuugcuauugagcag

SEQ ID NO: 26585 - RNA, 20 nt, Artificial Sequence
  targeting sequence with TTCN PAM
gaaucaggcaaaacuauaaa

SEQ ID NO: 26586 - RNA, 20 nt, Artificial Sequence
  targeting sequence with TTCN PAM
gaaguuaauguacauucaua

SEQ ID NO: 26587 - RNA, 20 nt, Artificial Sequence
  targeting sequence with TTCN PAM
uuauaguuuugccugauucu

SEQ ID NO: 26588 - RNA, 20 nt, Artificial Sequence
  targeting sequence with TTCN PAM
aagagauaaauacuaaagca

SEQ ID NO: 26589 - RNA, 20 nt, Artificial Sequence
  targeting sequence with TTCN PAM
uccauaguccugaguacaaa

SEQ ID NO: 26590 - RNA, 20 nt, Artificial Sequence
  targeting sequence with TTCN PAM
cauuucauccauaguccuga

SEQ ID NO: 26591 - RNA, 20 nt, Artificial Sequence
  targeting sequence with TTCN PAM
acacaaccaccauuuucaca

SEQ ID NO: 26592 - RNA, 20 nt, Artificial Sequence
  targeting sequence with TTCN PAM
gcugaucuggagauacaagu

SEQ ID NO: 26593 - RNA, 20 nt, Artificial Sequence
  targeting sequence with TTCN PAM
cacugagauauguguauauu

SEQ ID NO: 26594 - RNA, 20 nt, Artificial Sequence
  targeting sequence with TTCN PAM
gaaaauuuccaaguccuugg

SEQ ID NO: 26595 - RNA, 20 nt, Artificial Sequence
  targeting sequence with TTCN PAM
gaauuguaaagcaauauaca

SEQ ID NO: 26596 - RNA, 20 nt, Artificial Sequence
  targeting sequence with TTCN PAM
aaguccuugggaaaaauacu

SEQ ID NO: 26597 - RNA, 20 nt, Artificial Sequence
  targeting sequence with TTCN PAM
caaggacuuggaaauuuucu

SEQ ID NO: 26598 - RNA, 20 nt, Artificial Sequence
  targeting sequence with TTCN PAM
aaguauuuuucccaaggacu

SEQ ID NO: 26599 - RNA, 20 nt, Artificial Sequence
  targeting sequence with TTCN PAM
uagugcucagcuacuuauuu

SEQ ID NO: 26600 - RNA, 20 nt, Artificial Sequence
  targeting sequence with TTCN PAM
uuuuuuuuuuuuuuuuuugg

SEQ ID NO: 26601 - RNA, 20 nt, Artificial Sequence
  targeting sequence with TTCN PAM
ugauggaucuagguggccaa

SEQ ID NO: 26602 - RNA, 20 nt, Artificial Sequence
  targeting sequence with TTCN PAM
agguggcucuaaaucaaauu

SEQ ID NO: 26603 - RNA, 20 nt, Artificial Sequence
  targeting sequence with TTCN PAM
uauuuguuaugcaugccugg

SEQ ID NO: 26604 - RNA, 20 nt, Artificial Sequence
  targeting sequence with TTCN PAM
aauuuaacccauguuuuucc

SEQ ID NO: 26605 - RNA, 20 nt, Artificial Sequence
  targeting sequence with TTCN PAM
aagaugccaggcaugcauaa

SEQ ID NO: 26606 - RNA, 20 nt, Artificial Sequence
  targeting sequence with TTCN PAM
caagcaguccaaggcaaaug

SEQ ID NO: 26607 - RNA, 20 nt, Artificial Sequence
  targeting sequence with TTCN PAM
uuugccuuggacugcuuggg

SEQ ID NO: 26608 - RNA, 20 nt, Artificial Sequence
  targeting sequence with TTCN PAM
uugaaagaaacacugauuuu

SEQ ID NO: 26609 - RNA, 20 nt, Artificial Sequence
  targeting sequence with TTCN PAM
augaacaagaguuucauuug

SEQ ID NO: 26610 - RNA, 20 nt, Artificial Sequence
  targeting sequence with TTCN PAM
uucaaugaacaagaguuuca

SEQ ID NO: 26611 - RNA, 20 nt, Artificial Sequence
  targeting sequence with TTCN PAM
aguaacuauuucgcuugaga

SEQ ID NO: 26612 - RNA, 20 nt, Artificial Sequence
  targeting sequence with TTCN PAM
cuugagaaagugaggaugac

SEQ ID NO: 26613 - RNA, 20 nt, Artificial Sequence
  targeting sequence with TTCN PAM
caagcgaaauaguuacugga

SEQ ID NO: 26614 - RNA, 20 nt, Artificial Sequence
  targeting sequence with TTCN PAM
uugcagaguaagugucaucc

SEQ ID NO: 26615 - RNA, 20 nt, Artificial Sequence
  targeting sequence with TTCN PAM
guccaaauagcuuuggguaa

SEQ ID NO: 26616 - RNA, 20 nt, Artificial Sequence
  targeting sequence with TTCN PAM
uuuuacccaaagcuauuugg

SEQ ID NO: 26617 - RNA, 20 nt, Artificial Sequence
  targeting sequence with TTCN PAM
uaguuguucauuuuacccaa

SEQ ID NO: 26618 - RNA, 20 nt, Artificial Sequence
  targeting sequence with TTCN PAM
ccauuauuacaaccuuacac

SEQ ID NO: 26619 - RNA, 20 nt, Artificial Sequence
  targeting sequence with TTCN PAM
gcaguagaucucagccaggg

SEQ ID NO: 26620 - RNA, 20 nt, Artificial Sequence
  targeting sequence with TTCN PAM
gcagcucaggcuauuuccuu

SEQ ID NO: 26621 - RNA, 20 nt, Artificial Sequence
  targeting sequence with TTCN PAM
uuugucugucuauucaacca

SEQ ID NO: 26622 - RNA, 20 nt, Artificial Sequence
  targeting sequence with TTCN PAM
accagcccccacuuaaagcu

SEQ ID NO: 26623 - RNA, 20 nt, Artificial Sequence
  targeting sequence with TTCN PAM
ggaugagauuuuuuuuuuuu

SEQ ID NO: 26624 - RNA, 20 nt, Artificial Sequence
  targeting sequence with TTCN PAM
gaggagagugagggcuccau

SEQ ID NO: 26625 - RNA, 20 nt, Artificial Sequence
  targeting sequence with TTCN PAM
uccuccuccucucucacaag

SEQ ID NO: 26626 - RNA, 20 nt, Artificial Sequence
  targeting sequence with TTCN PAM
gcauauuccuccuccuccuc

SEQ ID NO: 26627 - RNA, 20 nt, Artificial Sequence
  targeting sequence with TTCN PAM
cccagauuugaacauguugu

SEQ ID NO: 26628 - RNA, 20 nt, Artificial Sequence
  targeting sequence with TTCN PAM
aaucugggagaaaccugagg

SEQ ID NO: 26629 - RNA, 20 nt, Artificial Sequence
  targeting sequence with TTCN PAM
gccucacagggcuggaguaa

SEQ ID NO: 26630 - RNA, 20 nt, Artificial Sequence
  targeting sequence with TTCN PAM
acccugacaaagcaguauca

SEQ ID NO: 26631 - RNA, 20 nt, Artificial Sequence
  targeting sequence with TTCN PAM
uauuacagugauacugcuuu

SEQ ID NO: 26632 - RNA, 20 nt, Artificial Sequence
  targeting sequence with TTCN PAM
gggcauguuggcagcuguac

SEQ ID NO: 26633 - RNA, 20 nt, Artificial Sequence
  targeting sequence with TTCN PAM
guacagcugccaacaugccc

SEQ ID NO: 26634 - RNA, 20 nt, Artificial Sequence
  targeting sequence with TTCN PAM
agaaaguaauggcaauucca

SEQ ID NO: 26635 - RNA, 20 nt, Artificial Sequence
  targeting sequence with TTCN PAM
agaacaggcauucuguacag

SEQ ID NO: 26636 - RNA, 20 nt, Artificial Sequence
  targeting sequence with TTCN PAM
aaaacaagagaucuauggug

SEQ ID NO: 26637 - RNA, 20 nt, Artificial Sequence
  targeting sequence with TTCN PAM
gcccaguuaagcaauaagca

SEQ ID NO: 26638 - RNA, 20 nt, Artificial Sequence
  targeting sequence with TTCN PAM
aaguauuuugggugcuuauu

SEQ ID NO: 26639 - RNA, 20 nt, Artificial Sequence
  targeting sequence with TTCN PAM
accauuaaacuuuugagcug

SEQ ID NO: 26640 - RNA, 20 nt, Artificial Sequence
  targeting sequence with TTCN PAM
uuucuaccauuaaacuuuug

SEQ ID NO: 26641 - RNA, 20 nt, Artificial Sequence
  targeting sequence with TTCN PAM
ccuugacccuauuuuguguc

SEQ ID NO: 26642 - RNA, 20 nt, Artificial Sequence
  targeting sequence with TTCN PAM
uccagacacaaaauaggguc

SEQ ID NO: 26643 - RNA, 20 nt, Artificial Sequence
  targeting sequence with TTCN PAM
ugauuauuuccuccagacac

SEQ ID NO: 26644 - RNA, 20 nt, Artificial Sequence
  targeting sequence with TTCN PAM
uccugauuauuuccuccaga

SEQ ID NO: 26645 - RNA, 20 nt, Artificial Sequence
  targeting sequence with TTCN PAM
ucuuccugauuauuuccucc

SEQ ID NO: 26646 - RNA, 20 nt, Artificial Sequence
  targeting sequence with TTCN PAM
aguuuucuucuuccugauua

SEQ ID NO: 26647 - RNA, 20 nt, Artificial Sequence
  targeting sequence with TTCN PAM
uccaguuuucuucuuccuga

SEQ ID NO: 26648 - RNA, 20 nt, Artificial Sequence
  targeting sequence with TTCN PAM
gaucugaucuguuccugggc

SEQ ID NO: 26649 - RNA, 20 nt, Artificial Sequence
  targeting sequence with TTCN PAM
ugggcacuacgaccuagcug

SEQ ID NO: 26650 - RNA, 20 nt, Artificial Sequence
  targeting sequence with TTCN PAM
gcuaggucguagugcccagg

SEQ ID NO: 26651 - RNA, 20 nt, Artificial Sequence
  targeting sequence with TTCN PAM
ucagcuaggucguagugccc

SEQ ID NO: 26652 - RNA, 20 nt, Artificial Sequence
  targeting sequence with TTCN PAM
auaguaaagucacagaggug

SEQ ID NO: 26653 - RNA, 20 nt, Artificial Sequence
  targeting sequence with TTCN PAM
cccuguuccauaguaaaguc

SEQ ID NO: 26654 - RNA, 20 nt, Artificial Sequence
  targeting sequence with TTCN PAM
ggaaauacauuuuugguaau

SEQ ID NO: 26655 - RNA, 20 nt, Artificial Sequence
  targeting sequence with TTCN PAM
agaauauucucccuguucca

SEQ ID NO: 26656 - RNA, 20 nt, Artificial Sequence
  targeting sequence with TTCN PAM
ggcauauauccauuaccaaa

SEQ ID NO: 26657 - RNA, 20 nt, Artificial Sequence
  targeting sequence with TTCN PAM
guucuggcauauauccauua

SEQ ID NO: 26658 - RNA, 20 nt, Artificial Sequence
  targeting sequence with TTCN PAM
caccuucaguucuggcauau

SEQ ID NO: 26659 - RNA, 20 nt, Artificial Sequence
  targeting sequence with TTCN PAM
uaugugcccaaaaggcaaac

SEQ ID NO: 26660 - RNA, 20 nt, Artificial Sequence
  targeting sequence with TTCN PAM
uuuuaguucaagaaugugug

SEQ ID NO: 26661 - RNA, 20 nt, Artificial Sequence
  targeting sequence with TTCN PAM
agaaugugugccuuuagaaa

SEQ ID NO: 26662 - RNA, 20 nt, Artificial Sequence
  targeting sequence with TTCN PAM
ugaacuaaaaagaaaugaug

SEQ ID NO: 26663 - RNA, 20 nt, Artificial Sequence
  targeting sequence with TTCN PAM
aaaggcacacauucuugaac

SEQ ID NO: 26664 - RNA, 20 nt, Artificial Sequence
  targeting sequence with TTCN PAM
uccuccaaagaagaggggca

SEQ ID NO: 26665 - RNA, 20 nt, Artificial Sequence
  targeting sequence with TTCN PAM
uccaaagaagaggggcacua

SEQ ID NO: 26666 - RNA, 20 nt, Artificial Sequence
  targeting sequence with TTCN PAM
uuggaggaagaauuucuaaa

SEQ ID NO: 26667 - RNA, 20 nt, Artificial Sequence
  targeting sequence with TTCN PAM
ggcuccuuuuuuagugcccc

SEQ ID NO: 26668 - RNA, 20 nt, Artificial Sequence
  targeting sequence with TTCN PAM
uguucuggcuccuuuuuuag

SEQ ID NO: 26669 - RNA, 20 nt, Artificial Sequence
  targeting sequence with TTCN PAM
accaagagaaaacagggcaa

SEQ ID NO: 26670 - RNA, 20 nt, Artificial Sequence
  targeting sequence with TTCN PAM
cuugguagaaaauucauguu

SEQ ID NO: 26671 - RNA, 20 nt, Artificial Sequence
  targeting sequence with TTCN PAM
uuuacauuuuaugguguccc

SEQ ID NO: 26672 - RNA, 20 nt, Artificial Sequence
  targeting sequence with TTCN PAM
uaguauaagggacaccauaa

SEQ ID NO: 26673 - RNA, 20 nt, Artificial Sequence
  targeting sequence with TTCN PAM
auucuagaccaaaagugacc

SEQ ID NO: 26674 - RNA, 20 nt, Artificial Sequence
  targeting sequence with TTCN PAM
agaccaaaagugacccaaua

SEQ ID NO: 26675 - RNA, 20 nt, Artificial Sequence
  targeting sequence with TTCN PAM
uggcuaaauuuuacuuguua

SEQ ID NO: 26676 - RNA, 20 nt, Artificial Sequence
  targeting sequence with TTCN PAM
uuuaucuccauugucuugug

SEQ ID NO: 26677 - RNA, 20 nt, Artificial Sequence
  targeting sequence with TTCN PAM
cauuagugcuguaguacagu

SEQ ID NO: 26678 - RNA, 20 nt, Artificial Sequence
  targeting sequence with TTCN PAM
uauagauuuaccuucccauu

SEQ ID NO: 26679 - RNA, 20 nt, Artificial Sequence
  targeting sequence with TTCN PAM
ucaauaguucagugggauaa

SEQ ID NO: 26680 - RNA, 20 nt, Artificial Sequence
  targeting sequence with TTCN PAM
auaguucagugggauaagga

SEQ ID NO: 26681 - RNA, 20 nt, Artificial Sequence
  targeting sequence with TTCN PAM
gugggauaaggagggauaag

SEQ ID NO: 26682 - RNA, 20 nt, Artificial Sequence
  targeting sequence with TTCN PAM
uuaucccuccuuaucccacu

SEQ ID NO: 26683 - RNA, 20 nt, Artificial Sequence
  targeting sequence with TTCN PAM
uuauuccuuaucccuccuua

SEQ ID NO: 26684 - RNA, 20 nt, Artificial Sequence
  targeting sequence with TTCN PAM
agauacacuagcuuuguuuu

SEQ ID NO: 26685 - RNA, 20 nt, Artificial Sequence
  targeting sequence with TTCN PAM
aaauuaccugcuuugaaaca

SEQ ID NO: 26686 - RNA, 20 nt, Artificial Sequence
  targeting sequence with TTCN PAM
uguauuaauaaacuuuucuu

SEQ ID NO: 26687 - RNA, 20 nt, Artificial Sequence
  targeting sequence with TTCN PAM
uuaggucauuuuauaagaac

SEQ ID NO: 26688 - RNA, 20 nt, Artificial Sequence
  targeting sequence with TTCN PAM
uauaaaaugaccuaaagaaa

SEQ ID NO: 26689 - RNA, 20 nt, Artificial Sequence
  targeting sequence with TTCN PAM
gagguucuuauaaaaugacc

SEQ ID NO: 26690 - RNA, 20 nt, Artificial Sequence
  targeting sequence with TTCN PAM
aaguagauuacucuuucaga

SEQ ID NO: 26691 - RNA, 20 nt, Artificial Sequence
  targeting sequence with TTCN PAM
uuugauaguguaaguauaac

SEQ ID NO: 26692 - RNA, 20 nt, Artificial Sequence
  targeting sequence with TTCN PAM
cuaguuuuaagaugcacaag

SEQ ID NO: 26693 - RNA, 20 nt, Artificial Sequence
  targeting sequence with TTCN PAM
ugugcaucuuaaaacuaggg

SEQ ID NO: 26694 - RNA, 20 nt, Artificial Sequence
  targeting sequence with TTCN PAM
gggcacuguuucuugugcau

SEQ ID NO: 26695 - RNA, 20 nt, Artificial Sequence
  targeting sequence with TTCN PAM
auugguaauaaccaccauuc

SEQ ID NO: 26696 - RNA, 20 nt, Artificial Sequence
  targeting sequence with TTCN PAM
uuucaauugguaauaaccac

SEQ ID NO: 26697 - RNA, 20 nt, Artificial Sequence
  targeting sequence with TTCN PAM
gagcuucuuucuuagcaaua

SEQ ID NO: 26698 - RNA, 20 nt, Artificial Sequence
  targeting sequence with TTCN PAM
uucuuagcaauaucuuaaca

SEQ ID NO: 26699 - RNA, 20 nt, Artificial Sequence
  targeting sequence with TTCN PAM
agaucugauagggccacaac

SEQ ID NO: 26700 - RNA, 20 nt, Artificial Sequence
  targeting sequence with TTCN PAM
ccauuucuguucuuucuacu

SEQ ID NO: 26701 - RNA, 20 nt, Artificial Sequence
  targeting sequence with TTCN PAM
guucuuucuacuaaaccaug

SEQ ID NO: 26702 - RNA, 20 nt, Artificial Sequence
  targeting sequence with TTCN PAM
uucuacuaaaccauggugua

SEQ ID NO: 26703 - RNA, 20 nt, Artificial Sequence
  targeting sequence with TTCN PAM
acuaaaccaugguguacccu

SEQ ID NO: 26704 - RNA, 20 nt, Artificial Sequence
  targeting sequence with TTCN PAM
uacuucaugcacugucauac

SEQ ID NO: 26705 - RNA, 20 nt, Artificial Sequence
  targeting sequence with TTCN PAM
ugcacugucauaccaaucug

SEQ ID NO: 26706 - RNA, 20 nt, Artificial Sequence
  targeting sequence with TTCN PAM
uacaauggugacauaaaaaa

SEQ ID NO: 26707 - RNA, 20 nt, Artificial Sequence
  targeting sequence with TTCN PAM
auuguuuucauacaauggug

SEQ ID NO: 26708 - RNA, 20 nt, Artificial Sequence
  targeting sequence with TTCN PAM
uuuguuuguuccauuguuuu

SEQ ID NO: 26709 - RNA, 20 nt, Artificial Sequence
  targeting sequence with TTCN PAM
auuucugcaauguacucacu

SEQ ID NO: 26710 - RNA, 20 nt, Artificial Sequence
  targeting sequence with TTCN PAM
gcaauguacucacuuugcag

SEQ ID NO: 26711 - RNA, 20 nt, Artificial Sequence
  targeting sequence with TTCN PAM
ugguuugguauuccugccuu

SEQ ID NO: 26712 - RNA, 20 nt, Artificial Sequence
  targeting sequence with TTCN PAM
ugccuuauagcuucacuaua

SEQ ID NO: 26713 - RNA, 20 nt, Artificial Sequence
  targeting sequence with TTCN PAM
uuugguaacuaaaaagauau

SEQ ID NO: 26714 - RNA, 20 nt, Artificial Sequence
  targeting sequence with TTCN PAM
uaccuaggacucuccagacu

SEQ ID NO: 26715 - RNA, 20 nt, Artificial Sequence
  targeting sequence with TTCN PAM
guuaacuuacuguuuuucau

SEQ ID NO: 26716 - RNA, 20 nt, Artificial Sequence
  targeting sequence with TTCN PAM
cuccucuccugguagacaug

SEQ ID NO: 26717 - RNA, 20 nt, Artificial Sequence
  targeting sequence with TTCN PAM
aucauagcagagcugguagg

SEQ ID NO: 26718 - RNA, 20 nt, Artificial Sequence
  targeting sequence with TTCN PAM
uccacaacugaugcaccuac

SEQ ID NO: 26719 - RNA, 20 nt, Artificial Sequence
  targeting sequence with TTCN PAM
uguugauuuggggacuuccc

SEQ ID NO: 26720 - RNA, 20 nt, Artificial Sequence
  targeting sequence with TTCN PAM
cuuuggggccucuggcuugc

SEQ ID NO: 26721 - RNA, 20 nt, Artificial Sequence
  targeting sequence with TTCN PAM
ucuuggguggcacucgaauc

SEQ ID NO: 26722 - RNA, 20 nt, Artificial Sequence
  targeting sequence with TTCN PAM
agugccacccaagaugaaga

SEQ ID NO: 26723 - RNA, 20 nt, Artificial Sequence
  targeting sequence with TTCN PAM
gagcuguggggugggugggg

SEQ ID NO: 26724 - RNA, 20 nt, Artificial Sequence
  targeting sequence with TTCN PAM
ggcuuuccagauccauuuca

SEQ ID NO: 26725 - RNA, 20 nt, Artificial Sequence
  targeting sequence with TTCN PAM
agauccauuucagguucugg

SEQ ID NO: 26726 - RNA, 20 nt, Artificial Sequence
  targeting sequence with TTCN PAM
gguucuggaucugccugaau

SEQ ID NO: 26727 - RNA, 20 nt, Artificial Sequence
  targeting sequence with TTCN PAM
ggaucugccugaauuugcug

SEQ ID NO: 26728 - RNA, 20 nt, Artificial Sequence
  targeting sequence with TTCN PAM
ggcagauccagaaccugaaa

SEQ ID NO: 26729 - RNA, 20 nt, Artificial Sequence
  targeting sequence with TTCN PAM
agcaccagcgcaggagguca

SEQ ID NO: 26730 - RNA, 20 nt, Artificial Sequence
  targeting sequence with TTCN PAM
agccuuggccaaucacguua

SEQ ID NO: 26731 - RNA, 20 nt, Artificial Sequence
  targeting sequence with TTCN PAM
ccaaagcauugugggucauu

SEQ ID NO: 26732 - RNA, 20 nt, Artificial Sequence
  targeting sequence with TTCN PAM
gauucugucugcuuucuggc

SEQ ID NO: 26733 - RNA, 20 nt, Artificial Sequence
  targeting sequence with TTCN PAM
gucugcuuucuggccucugc

SEQ ID NO: 26734 - RNA, 20 nt, Artificial Sequence
  targeting sequence with TTCN PAM
ggccucugcaucuugggauu

SEQ ID NO: 26735 - RNA, 20 nt, Artificial Sequence
  targeting sequence with TTCN PAM
cugcccgaaggcuccaucag

SEQ ID NO: 26736 - RNA, 20 nt, Artificial Sequence
  targeting sequence with TTCN PAM
ggcagugaacaguuauuuga

SEQ ID NO: 26737 - RNA, 20 nt, Artificial Sequence
  targeting sequence with TTCN PAM
acagugacuacgcaugcagc

SEQ ID NO: 26738 - RNA, 20 nt, Artificial Sequence
  targeting sequence with TTCN PAM
ucucacagcugcaugcguag

SEQ ID NO: 26739 - RNA, 20 nt, Artificial Sequence
  targeting sequence with TTCN PAM
ugccuaucuaauguuaaaaa

SEQ ID NO: 26740 - RNA, 20 nt, Artificial Sequence
  targeting sequence with TTCN PAM
uaaccacaguuaauuauuca

SEQ ID NO: 26741 - RNA, 20 nt, Artificial Sequence
  targeting sequence with TTCN PAM
caggcugaaacucaguauaa

SEQ ID NO: 26742 - RNA, 20 nt, Artificial Sequence
  targeting sequence with TTCN PAM
gccugugaauaauuaacugu

SEQ ID NO: 26743 - RNA, 20 nt, Artificial Sequence
  targeting sequence with TTCN PAM
uugauuauacugaguuucag

SEQ ID NO: 26744 - RNA, 20 nt, Artificial Sequence
  targeting sequence with TTCN PAM
cacuguuguucuuugauuau

SEQ ID NO: 26745 - RNA, 20 nt, Artificial Sequence
  targeting sequence with TTCN PAM
auuaaaauccacauauaguu

SEQ ID NO: 26746 - RNA, 20 nt, Artificial Sequence
  targeting sequence with TTCN PAM
uauucaucaaguucacuggu

SEQ ID NO: 26747 - RNA, 20 nt, Artificial Sequence
  targeting sequence with TTCN PAM
ucaaguucacugguaacuag

SEQ ID NO: 26748 - RNA, 20 nt, Artificial Sequence
  targeting sequence with TTCN PAM
cugguaacuagagaugacag

SEQ ID NO: 26749 - RNA, 20 nt, Artificial Sequence
  targeting sequence with TTCN PAM
caaaagagcaaaccugucau

SEQ ID NO: 26750 - RNA, 20 nt, Artificial Sequence
  targeting sequence with TTCN PAM
cuucucaaaagagcaaaccu

SEQ ID NO: 26751 - RNA, 20 nt, Artificial Sequence
  targeting sequence with TTCN PAM
auucucuucucaaaagagca

SEQ ID NO: 26752 - RNA, 20 nt, Artificial Sequence
  targeting sequence with TTCN PAM
acuuacaggauuuuuauuuc

SEQ ID NO: 26753 - RNA, 20 nt, Artificial Sequence
  targeting sequence with TTCN PAM
cugcugaagcacaaaugacc

SEQ ID NO: 26754 - RNA, 20 nt, Artificial Sequence
  targeting sequence with TTCN PAM
gcagagaauucaacuuacag

SEQ ID NO: 26755 - RNA, 20 nt, Artificial Sequence
  targeting sequence with TTCN PAM
ggcaccauaugagugaaugg

SEQ ID NO: 26756 - RNA, 20 nt, Artificial Sequence
  targeting sequence with TTCN PAM
cucauauggugccagaaagg

SEQ ID NO: 26757 - RNA, 20 nt, Artificial Sequence
  targeting sequence with TTCN PAM
gacagaaucagaaucagaga

SEQ ID NO: 26758 - RNA, 20 nt, Artificial Sequence
  targeting sequence with TTCN PAM
gucugaaccauucacucaua

SEQ ID NO: 26759 - RNA, 20 nt, Artificial Sequence
  targeting sequence with TTCN PAM
gauucugucugaaccauuca

SEQ ID NO: 26760 - RNA, 20 nt, Artificial Sequence
  targeting sequence with TTCN PAM
ugauagcugguacugagcaa

SEQ ID NO: 26761 - RNA, 20 nt, Artificial Sequence
  targeting sequence with TTCN PAM
aagaaaucccuuucucuaua

SEQ ID NO: 26762 - RNA, 20 nt, Artificial Sequence
  targeting sequence with TTCN PAM
uugaaucuccuuucuugaua

SEQ ID NO: 26763 - RNA, 20 nt, Artificial Sequence
  targeting sequence with TTCN PAM
cuauagugucaucccugaca

SEQ ID NO: 26764 - RNA, 20 nt, Artificial Sequence
  targeting sequence with TTCN PAM
gucagggaugacacuauaga

SEQ ID NO: 26765 - RNA, 20 nt, Artificial Sequence
  targeting sequence with TTCN PAM
cauauauccauacaaacuca

SEQ ID NO: 26766 - RNA, 20 nt, Artificial Sequence
  targeting sequence with TTCN PAM
auccuacccaguuacuuugc

SEQ ID NO: 26767 - RNA, 20 nt, Artificial Sequence
  targeting sequence with TTCN PAM
cuacuuuucuauccuaccca

SEQ ID NO: 26768 - RNA, 20 nt, Artificial Sequence
  targeting sequence with TTCN PAM
uuuucucuacuuuucuaucc

SEQ ID NO: 26769 - RNA, 20 nt, Artificial Sequence
  targeting sequence with TTCN PAM
ugcauuuaauacugguauau

SEQ ID NO: 26770 - RNA, 20 nt, Artificial Sequence
  targeting sequence with TTCN PAM
uuuuaauuucuugcauuuaa

SEQ ID NO: 26771 - RNA, 20 nt, Artificial Sequence
  targeting sequence with TTCN PAM
gcuuccuuuuaauuucuugc

SEQ ID NO: 26772 - RNA, 20 nt, Artificial Sequence
  targeting sequence with TTCN PAM
uaauagaaaguguuuauuuu

SEQ ID NO: 26773 - RNA, 20 nt, Artificial Sequence
  targeting sequence with TTCN PAM
auuaggaaaaaucucaucau

SEQ ID NO: 26774 - RNA, 20 nt, Artificial Sequence
  targeting sequence with TTCN PAM
gugcauguauauaauuuugu

SEQ ID NO: 26775 - RNA, 20 nt, Artificial Sequence
  targeting sequence with TTCN PAM
guagcagcuucugugcaugu

SEQ ID NO: 26776 - RNA, 20 nt, Artificial Sequence
  targeting sequence with TTCN PAM
auauuuuucuuuaaauuuuu

SEQ ID NO: 26777 - RNA, 20 nt, Artificial Sequence
  targeting sequence with TTCN PAM
uuaaauuuuuguuuaaagga

SEQ ID NO: 26778 - RNA, 20 nt, Artificial Sequence
  targeting sequence with TTCN PAM
acaauuuaagccacuaccaa

SEQ ID NO: 26779 - RNA, 20 nt, Artificial Sequence
  targeting sequence with TTCN PAM
uugguaguggcuuaaauugu

SEQ ID NO: 26780 - RNA, 20 nt, Artificial Sequence
  targeting sequence with TTCN PAM
gggaauauguggacuugcug

SEQ ID NO: 26781 - RNA, 20 nt, Artificial Sequence
  targeting sequence with TTCN PAM
cagaacaggagcaccauggu

SEQ ID NO: 26782 - RNA, 20 nt, Artificial Sequence
  targeting sequence with TTCN PAM
agauugccacuugguggcag

SEQ ID NO: 26783 - RNA, 20 nt, Artificial Sequence
  targeting sequence with TTCN PAM
gcuaauuuauggcuuucuag

SEQ ID NO: 26784 - RNA, 20 nt, Artificial Sequence
  targeting sequence with TTCN PAM
cugugaacucaaggcuacua

SEQ ID NO: 26785 - RNA, 20 nt, Artificial Sequence
  targeting sequence with TTCN PAM
cagggaacucuuuuauucag

SEQ ID NO: 26786 - RNA, 20 nt, Artificial Sequence
  targeting sequence with TTCN PAM
acuaaacucuaguagccuug

SEQ ID NO: 26787 - RNA, 20 nt, Artificial Sequence
  targeting sequence with TTCN PAM
uguuccacuaaacucuagua

SEQ ID NO: 26788 - RNA, 20 nt, Artificial Sequence
  targeting sequence with TTCN PAM
ugaugacuacucucagaaga

SEQ ID NO: 26789 - RNA, 20 nt, Artificial Sequence
  targeting sequence with TTCN PAM
gagaguagucaucaggaaca

SEQ ID NO: 26790 - RNA, 20 nt, Artificial Sequence
  targeting sequence with TTCN PAM
aauauuuuaugggcacuguc

SEQ ID NO: 26791 - RNA, 20 nt, Artificial Sequence
  targeting sequence with TTCN PAM
uucaugccugugauuccauu

SEQ ID NO: 26792 - RNA, 20 nt, Artificial Sequence
  targeting sequence with TTCN PAM
ugccugugauuccauuaccu

SEQ ID NO: 26793 - RNA, 20 nt, Artificial Sequence
  targeting sequence with TTCN PAM
auuaccuaaucucuucauaa

SEQ ID NO: 26794 - RNA, 20 nt, Artificial Sequence
  targeting sequence with TTCN PAM
uaacagaggagcauaaacag

SEQ ID NO: 26795 - RNA, 20 nt, Artificial Sequence
  targeting sequence with TTCN PAM
uacuuucuaaaugccacaaa

SEQ ID NO: 26796 - RNA, 20 nt, Artificial Sequence
  targeting sequence with TTCN PAM
aaaugccacaaaauuguuug

SEQ ID NO: 26797 - RNA, 20 nt, Artificial Sequence
  targeting sequence with TTCN PAM
uaaauuaggcaaaugaauaa

SEQ ID NO: 26798 - RNA, 20 nt, Artificial Sequence
  targeting sequence with TTCN PAM
uuugccuaauuuaggaacaa

SEQ ID NO: 26799 - RNA, 20 nt, Artificial Sequence
  targeting sequence with TTCN PAM
caugguuguuauucauuugc

SEQ ID NO: 26800 - RNA, 20 nt, Artificial Sequence
  targeting sequence with TTCN PAM
auucucaugguuguuauuca

SEQ ID NO: 26801 - RNA, 20 nt, Artificial Sequence
  targeting sequence with TTCN PAM
uugccuuucacccaaauucu

SEQ ID NO: 26802 - RNA, 20 nt, Artificial Sequence
  targeting sequence with TTCN PAM
cccaaauucuuuguggcucc

SEQ ID NO: 26803 - RNA, 20 nt, Artificial Sequence
  targeting sequence with TTCN PAM
uuguggcuccacugaaaucu

SEQ ID NO: 26804 - RNA, 20 nt, Artificial Sequence
  targeting sequence with TTCN PAM
guggagccacaaagaauuug

SEQ ID NO: 26805 - RNA, 20 nt, Artificial Sequence
  targeting sequence with TTCN PAM
ugauugugcauugguuuugu

SEQ ID NO: 26806 - RNA, 20 nt, Artificial Sequence
  targeting sequence with TTCN PAM
uaucuuucccuuugggagaa

SEQ ID NO: 26807 - RNA, 20 nt, Artificial Sequence
  targeting sequence with TTCN PAM
cuuugggagaaccaagaaag

SEQ ID NO: 26808 - RNA, 20 nt, Artificial Sequence
  targeting sequence with TTCN PAM
cccaaagggaaagauaugaa

SEQ ID NO: 26809 - RNA, 20 nt, Artificial Sequence
  targeting sequence with TTCN PAM
ugguucucccaaagggaaag

SEQ ID NO: 26810 - RNA, 20 nt, Artificial Sequence
  targeting sequence with TTCN PAM
uucuugguucucccaaaggg

SEQ ID NO: 26811 - RNA, 20 nt, Artificial Sequence
  targeting sequence with TTCN PAM
ggugcuccuugugggcaaaa

SEQ ID NO: 26812 - RNA, 20 nt, Artificial Sequence
  targeting sequence with TTCN PAM
aaccaaauaugaaauaaaca

SEQ ID NO: 26813 - RNA, 20 nt, Artificial Sequence
  targeting sequence with TTCN PAM
uauuugguuagaaggggaua

SEQ ID NO: 26814 - RNA, 20 nt, Artificial Sequence
  targeting sequence with TTCN PAM
ucaugaguuugucuugcugg

SEQ ID NO: 26815 - RNA, 20 nt, Artificial Sequence
  targeting sequence with TTCN PAM
guaacuauuagccagcaaga

SEQ ID NO: 26816 - RNA, 20 nt, Artificial Sequence
  targeting sequence with TTCN PAM
uucaguaacuauuagccagc

SEQ ID NO: 26817 - RNA, 20 nt, Artificial Sequence
  targeting sequence with TTCN PAM
cagaggaaaagggcuaaugu

SEQ ID NO: 26818 - RNA, 20 nt, Artificial Sequence
  targeting sequence with TTCN PAM
ucugagaaacucaauucuuu

SEQ ID NO: 26819 - RNA, 20 nt, Artificial Sequence
  targeting sequence with TTCN PAM
ugcacugggcuauuuagauc

SEQ ID NO: 26820 - RNA, 20 nt, Artificial Sequence
  targeting sequence with TTCN PAM
caggaucuaaauagcccagu

SEQ ID NO: 26821 - RNA, 20 nt, Artificial Sequence
  targeting sequence with TTCN PAM
cacccucccaucuucucagg

SEQ ID NO: 26822 - RNA, 20 nt, Artificial Sequence
  targeting sequence with TTCN PAM
gcugcuuucacacccuccca

SEQ ID NO: 26823 - RNA, 20 nt, Artificial Sequence
  targeting sequence with TTCN PAM
guacuguucugcugcuuuca

SEQ ID NO: 26824 - RNA, 20 nt, Artificial Sequence
  targeting sequence with TTCN PAM
ucuauuugcacauuauuagc

SEQ ID NO: 26825 - RNA, 20 nt, Artificial Sequence
  targeting sequence with TTCN PAM
aacaacaacaacaaaaauca

SEQ ID NO: 26826 - RNA, 20 nt, Artificial Sequence
  targeting sequence with TTCN PAM
ugcugucuuuuaaucucaug

SEQ ID NO: 26827 - RNA, 20 nt, Artificial Sequence
  targeting sequence with TTCN PAM
uuuauucuugcugucuuuua

SEQ ID NO: 26828 - RNA, 20 nt, Artificial Sequence
  targeting sequence with TTCN PAM
acuugucucauaugcaaagg

SEQ ID NO: 26829 - RNA, 20 nt, Artificial Sequence
  targeting sequence with TTCN PAM
uaguaccuuugcauaugaga

SEQ ID NO: 26830 - RNA, 20 nt, Artificial Sequence
  targeting sequence with TTCN PAM
aaggcaaaacuuaccuuaau

SEQ ID NO: 26831 - RNA, 20 nt, Artificial Sequence
  targeting sequence with TTCN PAM
uuagggcugcaugcuaagug

SEQ ID NO: 26832 - RNA, 20 nt, Artificial Sequence
  targeting sequence with TTCN PAM
aaauuauuaccuuaaaacuu

SEQ ID NO: 26833 - RNA, 20 nt, Artificial Sequence
  targeting sequence with TTCN PAM
uagugcugcuauuaugcaga

SEQ ID NO: 26834 - RNA, 20 nt, Artificial Sequence
  targeting sequence with TTCN PAM
aaaccuuaacuaguuucuua

SEQ ID NO: 26835 - RNA, 20 nt, Artificial Sequence
  targeting sequence with TTCN PAM
guaggccaauagaaaaucuu

SEQ ID NO: 26836 - RNA, 20 nt, Artificial Sequence
  targeting sequence with TTCN PAM
auuggccuacagaaaauuuu

SEQ ID NO: 26837 - RNA, 20 nt, Artificial Sequence
  targeting sequence with TTCN PAM
uacugucagcaauuuuauag

SEQ ID NO: 26838 - RNA, 20 nt, Artificial Sequence
  targeting sequence with TTCN PAM
uuugugcuugcauucuuacu

SEQ ID NO: 26839 - RNA, 20 nt, Artificial Sequence
  targeting sequence with TTCN PAM
auagucucaaaguuguacag

SEQ ID NO: 26840 - RNA, 20 nt, Artificial Sequence
  targeting sequence with TTCN PAM
uuucuucuguaugucuuaca

SEQ ID NO: 26841 - RNA, 20 nt, Artificial Sequence
  targeting sequence with TTCN PAM
ucuguaugucuuacagaggc

SEQ ID NO: 26842 - RNA, 20 nt, Artificial Sequence
  targeting sequence with TTCN PAM
guaugucuuacagaggcuca

SEQ ID NO: 26843 - RNA, 20 nt, Artificial Sequence
  targeting sequence with TTCN PAM
uuugagccucuguaagacau

SEQ ID NO: 26844 - RNA, 20 nt, Artificial Sequence
  targeting sequence with TTCN PAM
uauucauuugagccucugua

SEQ ID NO: 26845 - RNA, 20 nt, Artificial Sequence
  targeting sequence with TTCN PAM
ccaauuaacuauuuauuuau

SEQ ID NO: 26846 - RNA, 20 nt, Artificial Sequence
  targeting sequence with TTCN PAM
ggguucaagcaauucuccua

SEQ ID NO: 26847 - RNA, 20 nt, Artificial Sequence
  targeting sequence with TTCN PAM
agcaauucuccuaccucugc

SEQ ID NO: 26848 - RNA, 20 nt, Artificial Sequence
  targeting sequence with TTCN PAM
ccuaccucugccucucaagu

SEQ ID NO: 26849 - RNA, 20 nt, Artificial Sequence
  targeting sequence with TTCN PAM
ccauguugaccaggcugguc

SEQ ID NO: 26850 - RNA, 20 nt, Artificial Sequence
  targeting sequence with TTCN PAM
agaccagccuggucaacaug

SEQ ID NO: 26851 - RNA, 20 nt, Artificial Sequence
  targeting sequence with TTCN PAM
uaccaaaaagcauuugauag

SEQ ID NO: 26852 - RNA, 20 nt, Artificial Sequence
  targeting sequence with TTCN PAM
uucuuaccaaaaagcauuug

SEQ ID NO: 26853 - RNA, 20 nt, Artificial Sequence
  targeting sequence with TTCN PAM
cucagcuucucugaaaagua

SEQ ID NO: 26854 - RNA, 20 nt, Artificial Sequence
  targeting sequence with TTCN PAM
cugaaaaguaaaguuauuau

SEQ ID NO: 26855 - RNA, 20 nt, Artificial Sequence
  targeting sequence with TTCN PAM
gagaagcugagugaauaaaa

SEQ ID NO: 26856 - RNA, 20 nt, Artificial Sequence
  targeting sequence with TTCN PAM
cccucugguuuacuuauaau

SEQ ID NO: 26857 - RNA, 20 nt, Artificial Sequence
  targeting sequence with TTCN PAM
cuuucucccucugguuuacu

SEQ ID NO: 26858 - RNA, 20 nt, Artificial Sequence
  targeting sequence with TTCN PAM
uguguccuuuugcuccuuuu

SEQ ID NO: 26859 - RNA, 20 nt, Artificial Sequence
  targeting sequence with TTCN PAM
accucuccccuuuuuccugu

SEQ ID NO: 26860 - RNA, 20 nt, Artificial Sequence
  targeting sequence with TTCN PAM
cuccuucgaccucuccccuu

SEQ ID NO: 26861 - RNA, 20 nt, Artificial Sequence
  targeting sequence with TTCN PAM
accucuccccuuucacuccu

SEQ ID NO: 26862 - RNA, 20 nt, Artificial Sequence
  targeting sequence with TTCN PAM
ucaccuuuugcuccuucuac

SEQ ID NO: 26863 - RNA, 20 nt, Artificial Sequence
  targeting sequence with TTCN PAM
aauaauuugguaaguucuca

SEQ ID NO: 26864 - RNA, 20 nt, Artificial Sequence
  targeting sequence with TTCN PAM
cagaauuuucaacaauuaac

SEQ ID NO: 26865 - RNA, 20 nt, Artificial Sequence
  targeting sequence with TTCN PAM
gagaacuuaccaaauuauuu

SEQ ID NO: 26866 - RNA, 20 nt, Artificial Sequence
  targeting sequence with TTCN PAM
acaauuaacuuuucuagcac

SEQ ID NO: 26867 - RNA, 20 nt, Artificial Sequence
  targeting sequence with TTCN PAM
agcacaauuuuacugaagac

SEQ ID NO: 26868 - RNA, 20 nt, Artificial Sequence
  targeting sequence with TTCN PAM
guaaaauugugcuagaaaag

SEQ ID NO: 26869 - RNA, 20 nt, Artificial Sequence
  targeting sequence with TTCN PAM
gagugugagcuaauggcaua

SEQ ID NO: 26870 - RNA, 20 nt, Artificial Sequence
  targeting sequence with TTCN PAM
aaauuaguaucagaaauaag

SEQ ID NO: 26871 - RNA, 20 nt, Artificial Sequence
  targeting sequence with TTCN PAM
gauacuaauuuagaacaacu

SEQ ID NO: 26872 - RNA, 20 nt, Artificial Sequence
  targeting sequence with TTCN PAM
cuuauuucugauacuaauuu

SEQ ID NO: 26873 - RNA, 20 nt, Artificial Sequence
  targeting sequence with TTCN PAM
acaaaaucacagcaaauuau

SEQ ID NO: 26874 - RNA, 20 nt, Artificial Sequence
  targeting sequence with TTCN PAM
cuuaaguuuuucuuuccaau

SEQ ID NO: 26875 - RNA, 20 nt, Artificial Sequence
  targeting sequence with TTCN PAM
uuccaauuuuuuaguuuuuu

SEQ ID NO: 26876 - RNA, 20 nt, Artificial Sequence
  targeting sequence with TTCN PAM
aauuuuuuaguuuuuugaua

SEQ ID NO: 26877 - RNA, 20 nt, Artificial Sequence
  targeting sequence with TTCN PAM
uguccaaaccaaaaaagcuu

SEQ ID NO: 26878 - RNA, 20 nt, Artificial Sequence
  targeting sequence with TTCN PAM
cugacuacaaagaguuggau

SEQ ID NO: 26879 - RNA, 20 nt, Artificial Sequence
  targeting sequence with TTCN PAM
ucacucuuccuuaagcacuu

SEQ ID NO: 26880 - RNA, 20 nt, Artificial Sequence
  targeting sequence with TTCN PAM
uuaagcacuucuaaggugua

SEQ ID NO: 26881 - RNA, 20 nt, Artificial Sequence
  targeting sequence with TTCN PAM
aagguguacaauccuuuuag

SEQ ID NO: 26882 - RNA, 20 nt, Artificial Sequence
  targeting sequence with TTCN PAM
uaaaaggauuguacaccuua

SEQ ID NO: 26883 - RNA, 20 nt, Artificial Sequence
  targeting sequence with TTCN PAM
gcuuuuccuaaaaggauugu

SEQ ID NO: 26884 - RNA, 20 nt, Artificial Sequence
  targeting sequence with TTCN PAM
uaauauuugcuuuucagcuu

SEQ ID NO: 26885 - RNA, 20 nt, Artificial Sequence
  targeting sequence with TTCN PAM
caccuuguaauucuuaauau

SEQ ID NO: 26886 - RNA, 20 nt, Artificial Sequence
  targeting sequence with TTCN PAM
ccaucuaaguuucucaccuu

SEQ ID NO: 26887 - RNA, 20 nt, Artificial Sequence
  targeting sequence with TTCN PAM
gcauaucuguaaaagguaag

SEQ ID NO: 26888 - RNA, 20 nt, Artificial Sequence
  targeting sequence with TTCN PAM
gucguuuucugcauaucugu

SEQ ID NO: 26889 - RNA, 20 nt, Artificial Sequence
  targeting sequence with TTCN PAM
accagugagagaugagggcu

SEQ ID NO: 26890 - RNA, 20 nt, Artificial Sequence
  targeting sequence with TTCN PAM
aguacuuuucaguauuuucu

SEQ ID NO: 26891 - RNA, 20 nt, Artificial Sequence
  targeting sequence with TTCN PAM
guauuuucuaauuuuuuaaa

SEQ ID NO: 26892 - RNA, 20 nt, Artificial Sequence
  targeting sequence with TTCN PAM
aauuuuuuaaaguauaauca

SEQ ID NO: 26893 - RNA, 20 nt, Artificial Sequence
  targeting sequence with TTCN PAM
ugauuauacuuuaaaaaauu

SEQ ID NO: 26894 - RNA, 20 nt, Artificial Sequence
  targeting sequence with TTCN PAM
uguaccuguuuuauauuuca

SEQ ID NO: 26895 - RNA, 20 nt, Artificial Sequence
  targeting sequence with TTCN PAM
aguaguuuccuaaucuguau

SEQ ID NO: 26896 - RNA, 20 nt, Artificial Sequence
  targeting sequence with TTCN PAM
uaaucuguaucugccauucu

SEQ ID NO: 26897 - RNA, 20 nt, Artificial Sequence
  targeting sequence with TTCN PAM
cuauucaaaggcaauucuaa

SEQ ID NO: 26898 - RNA, 20 nt, Artificial Sequence
  targeting sequence with TTCN PAM
aaggcaauucuaaaaauccu

SEQ ID NO: 26899 - RNA, 20 nt, Artificial Sequence
  targeting sequence with TTCN PAM
aaaaauccuaucuuaggcca

SEQ ID NO: 26900 - RNA, 20 nt, Artificial Sequence
  targeting sequence with TTCN PAM
ugccucggagugcugggauu

SEQ ID NO: 26901 - RNA, 20 nt, Artificial Sequence
  targeting sequence with TTCN PAM
ugggcucagaugaucuuccu

SEQ ID NO: 26902 - RNA, 20 nt, Artificial Sequence
  targeting sequence with TTCN PAM
ucgagggcagggucauaugc

SEQ ID NO: 26903 - RNA, 20 nt, Artificial Sequence
  targeting sequence with TTCN PAM
guccuagauuaauuccucga

SEQ ID NO: 26904 - RNA, 20 nt, Artificial Sequence
  targeting sequence with TTCN PAM
uguauggacaucuuauuuuc

SEQ ID NO: 26905 - RNA, 20 nt, Artificial Sequence
  targeting sequence with TTCN PAM
guauguuucauguauggaca

SEQ ID NO: 26906 - RNA, 20 nt, Artificial Sequence
  targeting sequence with TTCN PAM
ccacuuguuuaguuuugugc

SEQ ID NO: 26907 - RNA, 20 nt, Artificial Sequence
  targeting sequence with TTCN PAM
uacacacuucaccacuuguu

SEQ ID NO: 26908 - RNA, 20 nt, Artificial Sequence
  targeting sequence with TTCN PAM
ugacuuuuaaugguaauugc

SEQ ID NO: 26909 - RNA, 20 nt, Artificial Sequence
  targeting sequence with TTCN PAM
aacugaucuuccugacuuuu

SEQ ID NO: 26910 - RNA, 20 nt, Artificial Sequence
  targeting sequence with TTCN PAM
caaacaaauccaauucuaac

SEQ ID NO: 26911 - RNA, 20 nt, Artificial Sequence
  targeting sequence with TTCN PAM
ucaggcuuucccaaacaaau

SEQ ID NO: 26912 - RNA, 20 nt, Artificial Sequence
  targeting sequence with TTCN PAM
gagcucaguaaaagcugcug

SEQ ID NO: 26913 - RNA, 20 nt, Artificial Sequence
  targeting sequence with TTCN PAM
gcuuauuuauccauugucuc

SEQ ID NO: 26914 - RNA, 20 nt, Artificial Sequence
  targeting sequence with TTCN PAM
gccagcaggcaguaaucaca

SEQ ID NO: 26915 - RNA, 20 nt, Artificial Sequence
  targeting sequence with TTCN PAM
cuccucucaugcaucuuaca

SEQ ID NO: 26916 - RNA, 20 nt, Artificial Sequence
  targeting sequence with TTCN PAM
cugauuaucaucuuucccuc

SEQ ID NO: 26917 - RNA, 20 nt, Artificial Sequence
  targeting sequence with TTCN PAM
uuaccuaauuucucugauua

SEQ ID NO: 26918 - RNA, 20 nt, Artificial Sequence
  targeting sequence with TTCN PAM
aaauuauaaguuccuuaccu

SEQ ID NO: 26919 - RNA, 20 nt, Artificial Sequence
  targeting sequence with TTCN PAM
uugucaucuuuuucuaaauu

SEQ ID NO: 26920 - RNA, 20 nt, Artificial Sequence
  targeting sequence with TTCN PAM
cagccauacuaaugggcuca

SEQ ID NO: 26921 - RNA, 20 nt, Artificial Sequence
  targeting sequence with TTCN PAM
auucccagccauacuaaugg

SEQ ID NO: 26922 - RNA, 20 nt, Artificial Sequence
  targeting sequence with TTCN PAM
auuaacuuuuuuauuccauu

SEQ ID NO: 26923 - RNA, 20 nt, Artificial Sequence
  targeting sequence with TTCN PAM
uuuccauuaacuuuuuuauu

SEQ ID NO: 26924 - RNA, 20 nt, Artificial Sequence
  targeting sequence with TTCN PAM
guacuuugugcgcucauucc

SEQ ID NO: 26925 - RNA, 20 nt, Artificial Sequence
  targeting sequence with TTCN PAM
uguugacucuucaguacuuu

SEQ ID NO: 26926 - RNA, 20 nt, Artificial Sequence
  targeting sequence with TTCN PAM
ucauaccauugcgacagaug

SEQ ID NO: 26927 - RNA, 20 nt, Artificial Sequence
  targeting sequence with TTCN PAM
cagcuggaaacguauuacga

SEQ ID NO: 26928 - RNA, 20 nt, Artificial Sequence
  targeting sequence with TTCN PAM
agcugagaacuauaaauacu

SEQ ID NO: 26929 - RNA, 20 nt, Artificial Sequence
  targeting sequence with TTCN PAM
uccuccugcaucuuauuuca

SEQ ID NO: 26930 - RNA, 20 nt, Artificial Sequence
  targeting sequence with TTCN PAM
acaauuaaaugucauccaua

SEQ ID NO: 26931 - RNA, 20 nt, Artificial Sequence
  targeting sequence with TTCN PAM
uuuagccccaaagaaauuga

SEQ ID NO: 26932 - RNA, 20 nt, Artificial Sequence
  targeting sequence with TTCN PAM
uuggggcuaaaugaaguaug

SEQ ID NO: 26933 - RNA, 20 nt, Artificial Sequence
  targeting sequence with TTCN PAM
uugcauccagccuugguaag

SEQ ID NO: 26934 - RNA, 20 nt, Artificial Sequence
  targeting sequence with TTCN PAM
uuuagaccugcuuaaauauu

SEQ ID NO: 26935 - RNA, 20 nt, Artificial Sequence
  targeting sequence with TTCN PAM
agcagaaagagaucauuuac

SEQ ID NO: 26936 - RNA, 20 nt, Artificial Sequence
  targeting sequence with TTCN PAM
gcuugaaagaguauauuuug

SEQ ID NO: 26937 - RNA, 20 nt, Artificial Sequence
  targeting sequence with TTCN PAM
acauauggucaauuuuugua

SEQ ID NO: 26938 - RNA, 20 nt, Artificial Sequence
  targeting sequence with TTCN PAM
guuuuuuuaaaauuugugag

SEQ ID NO: 26939 - RNA, 20 nt, Artificial Sequence
  targeting sequence with TTCN PAM
cugaccacaauguggauucc

SEQ ID NO: 26940 - RNA, 20 nt, Artificial Sequence
  targeting sequence with TTCN PAM
ugagguucaaaaagagcugg

SEQ ID NO: 26941 - RNA, 20 nt, Artificial Sequence
  targeting sequence with TTCN PAM
aaaagagcugggaggaaauc

SEQ ID NO: 26942 - RNA, 20 nt, Artificial Sequence
  targeting sequence with TTCN PAM
ucccagcucuuuuugaaccu

SEQ ID NO: 26943 - RNA, 20 nt, Artificial Sequence
  targeting sequence with TTCN PAM
uuuuuuguuuacugcuaucc

SEQ ID NO: 26944 - RNA, 20 nt, Artificial Sequence
  targeting sequence with TTCN PAM
uuuggucagagacaaggcuu

SEQ ID NO: 26945 - RNA, 20 nt, Artificial Sequence
  targeting sequence with TTCN PAM
augcucuugggacuguuucc

SEQ ID NO: 26946 - RNA, 20 nt, Artificial Sequence
  targeting sequence with TTCN PAM
uccaugcucuugggacuguu

SEQ ID NO: 26947 - RNA, 20 nt, Artificial Sequence
  targeting sequence with TTCN PAM
uaucugcacugggauucuuc

SEQ ID NO: 26948 - RNA, 20 nt, Artificial Sequence
  targeting sequence with TTCN PAM
gacaaacugcugaagacuga

SEQ ID NO: 26949 - RNA, 20 nt, Artificial Sequence
  targeting sequence with TTCN PAM
gcaguuugucagaauuuuug

SEQ ID NO: 26950 - RNA, 20 nt, Artificial Sequence
  targeting sequence with TTCN PAM
gucuucagcaguuugucaga

SEQ ID NO: 26951 - RNA, 20 nt, Artificial Sequence
  targeting sequence with TTCN PAM
aaccuacauucagucuucag

SEQ ID NO: 26952 - RNA, 20 nt, Artificial Sequence
  targeting sequence with TTCN PAM
cacucugauucuaaccuaca

SEQ ID NO: 26953 - RNA, 20 nt, Artificial Sequence
  targeting sequence with TTCN PAM
cauccucuugugggcuuuuc

SEQ ID NO: 26954 - RNA, 20 nt, Artificial Sequence
  targeting sequence with TTCN PAM
uccaggaaccucaaaaggcu

SEQ ID NO: 26955 - RNA, 20 nt, Artificial Sequence
  targeting sequence with TTCN PAM
uggaggaaaagcccacaaga

SEQ ID NO: 26956 - RNA, 20 nt, Artificial Sequence
  targeting sequence with TTCN PAM
cccugcauuagagagccuuu

SEQ ID NO: 26957 - RNA, 20 nt, Artificial Sequence
  targeting sequence with TTCN PAM
ucucugcuucccccugcauu

SEQ ID NO: 26958 - RNA, 20 nt, Artificial Sequence
  targeting sequence with TTCN PAM
cuacuuccucucugcuuccc

SEQ ID NO: 26959 - RNA, 20 nt, Artificial Sequence
  targeting sequence with TTCN PAM
cucauuagcuccacgggggu

SEQ ID NO: 26960 - RNA, 20 nt, Artificial Sequence
  targeting sequence with TTCN PAM
cuuaucucccuguggaacaa

SEQ ID NO: 26961 - RNA, 20 nt, Artificial Sequence
  targeting sequence with TTCN PAM
acagggagauaagggaaaua

SEQ ID NO: 26962 - RNA, 20 nt, Artificial Sequence
  targeting sequence with TTCN PAM
gguggaaucccacuacagcu

SEQ ID NO: 26963 - RNA, 20 nt, Artificial Sequence
  targeting sequence with TTCN PAM
accagaaauugcuccuugcu

SEQ ID NO: 26964 - RNA, 20 nt, Artificial Sequence
  targeting sequence with TTCN PAM
uccagcuguagugggauucc

SEQ ID NO: 26965 - RNA, 20 nt, Artificial Sequence
  targeting sequence with TTCN PAM
uuccuccagcuguaguggga

SEQ ID NO: 26966 - RNA, 20 nt, Artificial Sequence
  targeting sequence with TTCN PAM
uuuccuuccuccagcuguag

SEQ ID NO: 26967 - RNA, 20 nt, Artificial Sequence
  targeting sequence with TTCN PAM
cccuuauccaucuucacugu

SEQ ID NO: 26968 - RNA, 20 nt, Artificial Sequence
  targeting sequence with TTCN PAM
cuguuucucuaaaacagcaa

SEQ ID NO: 26969 - RNA, 20 nt, Artificial Sequence
  targeting sequence with TTCN PAM
cuaaaacagcaauagccuua

SEQ ID NO: 26970 - RNA, 20 nt, Artificial Sequence
  targeting sequence with TTCN PAM
gccugcauuuaaggcuauug

SEQ ID NO: 26971 - RNA, 20 nt, Artificial Sequence
  targeting sequence with TTCN PAM
gcucuuuccgccugcauuua

SEQ ID NO: 26972 - RNA, 20 nt, Artificial Sequence
  targeting sequence with TTCN PAM
auaguauccucaagcuaagg

SEQ ID NO: 26973 - RNA, 20 nt, Artificial Sequence
  targeting sequence with TTCN PAM
caacugcuauggggauucaa

SEQ ID NO: 26974 - RNA, 20 nt, Artificial Sequence
  targeting sequence with TTCN PAM
uuuucccaacugcuaugggg

SEQ ID NO: 26975 - RNA, 20 nt, Artificial Sequence
  targeting sequence with TTCN PAM
cuucuuuuucccaacugcua

SEQ ID NO: 26976 - RNA, 20 nt, Artificial Sequence
  targeting sequence with TTCN PAM
gaaggccacacccccaagac

SEQ ID NO: 26977 - RNA, 20 nt, Artificial Sequence
  targeting sequence with TTCN PAM
gaagacuauucccuucuuuu

SEQ ID NO: 26978 - RNA, 20 nt, Artificial Sequence
  targeting sequence with TTCN PAM
acuaucugcauaaaucugag

SEQ ID NO: 26979 - RNA, 20 nt, Artificial Sequence
  targeting sequence with TTCN PAM
gguuaagccucagauuuaug

SEQ ID NO: 26980 - RNA, 20 nt, Artificial Sequence
  targeting sequence with TTCN PAM
gugauguucugguuaagccu

SEQ ID NO: 26981 - RNA, 20 nt, Artificial Sequence
  targeting sequence with TTCN PAM
auuguuuuuacucaaagccu

SEQ ID NO: 26982 - RNA, 20 nt, Artificial Sequence
  targeting sequence with TTCN PAM
cagguguauuccauuguuuu

SEQ ID NO: 26983 - RNA, 20 nt, Artificial Sequence
  targeting sequence with TTCN PAM
ccgugagagucugagucuug

SEQ ID NO: 26984 - RNA, 20 nt, Artificial Sequence
  targeting sequence with TTCN PAM
cuuugugcuguuucuccgug

SEQ ID NO: 26985 - RNA, 20 nt, Artificial Sequence
  targeting sequence with TTCN PAM
ugcuuggcuuuggguuuucc

SEQ ID NO: 26986 - RNA, 20 nt, Artificial Sequence
  targeting sequence with TTCN PAM
ugucuuccugcuuggcuuug

SEQ ID NO: 26987 - RNA, 20 nt, Artificial Sequence
  targeting sequence with TTCN PAM
caguaauaccuuguucuugu

SEQ ID NO: 26988 - RNA, 20 nt, Artificial Sequence
  targeting sequence with TTCN PAM
aauuuucccaguaauaccuu

SEQ ID NO: 26989 - RNA, 20 nt, Artificial Sequence
  targeting sequence with TTCN PAM
cauggcaacaauaaauguca

SEQ ID NO: 26990 - RNA, 20 nt, Artificial Sequence
  targeting sequence with TTCN PAM
ggcauugggcuguguuugau

SEQ ID NO: 26991 - RNA, 20 nt, Artificial Sequence
  targeting sequence with TTCN PAM
ugcaaguccuuuagggugga

SEQ ID NO: 26992 - RNA, 20 nt, Artificial Sequence
  targeting sequence with TTCN PAM
guaagcauaucaagcauaua

SEQ ID NO: 26993 - RNA, 20 nt, Artificial Sequence
  targeting sequence with TTCN PAM
gcuuuaaacaaaaauuauga

SEQ ID NO: 26994 - RNA, 20 nt, Artificial Sequence
  targeting sequence with TTCN PAM
uaauuuuuguuuaaagcuga

SEQ ID NO: 26995 - RNA, 20 nt, Artificial Sequence
  targeting sequence with TTCN PAM
aaaauuuaugucauacgugg

SEQ ID NO: 26996 - RNA, 20 nt, Artificial Sequence
  targeting sequence with TTCN PAM
aauuuacugucuuguaguuc

SEQ ID NO: 26997 - RNA, 20 nt, Artificial Sequence
  targeting sequence with TTCN PAM
uuagaguuuuuacuguauua

SEQ ID NO: 26998 - RNA, 20 nt, Artificial Sequence
  targeting sequence with TTCN PAM
gagauaaaugaaaauuauaa

SEQ ID NO: 26999 - RNA, 20 nt, Artificial Sequence
  targeting sequence with TTCN PAM
uuuaucucugaaauuaccug

SEQ ID NO: 27000 - RNA, 20 nt, Artificial Sequence
  targeting sequence with TTCN PAM
acuugauuuuuuauaauuuu

SEQ ID NO: 27001 - RNA, 20 nt, Artificial Sequence
  targeting sequence with TTCN PAM
aauuugguuuccacuugauu

SEQ ID NO: 27002 - RNA, 20 nt, Artificial Sequence
  targeting sequence with TTCN PAM
agucuacuugauaagccucu

SEQ ID NO: 27003 - RNA, 20 nt, Artificial Sequence
  targeting sequence with TTCN PAM
gcuguuucaagucuacuuga

SEQ ID NO: 27004 - RNA, 20 nt, Artificial Sequence
  targeting sequence with TTCN PAM
uuuuucagcuguuucaaguc

SEQ ID NO: 27005 - RNA, 20 nt, Artificial Sequence
  targeting sequence with TTCN PAM
aguuuacugauucuuuuuuc

SEQ ID NO: 27006 - RNA, 20 nt, Artificial Sequence
  targeting sequence with TTCN PAM
acuagccuauuuucaaguuu

SEQ ID NO: 27007 - RNA, 20 nt, Artificial Sequence
  targeting sequence with TTCN PAM
guuuggguaguuucuacuag

SEQ ID NO: 27008 - RNA, 20 nt, Artificial Sequence
  targeting sequence with TTCN PAM
cuuuauauuucaguuugggu

SEQ ID NO: 27009 - RNA, 20 nt, Artificial Sequence
  targeting sequence with TTCN PAM
caccuggagaacauacaaca

SEQ ID NO: 27010 - RNA, 20 nt, Artificial Sequence
  targeting sequence with TTCN PAM
ccaggugggaaaaucucuuu

SEQ ID NO: 27011 - RNA, 20 nt, Artificial Sequence
  targeting sequence with TTCN PAM
gccacagcuguuguauguuc

SEQ ID NO: 27012 - RNA, 20 nt, Artificial Sequence
  targeting sequence with TTCN PAM
ggacuucugccacagcuguu

SEQ ID NO: 27013 - RNA, 20 nt, Artificial Sequence
  targeting sequence with TTCN PAM
ucuggacuucugccacagcu

SEQ ID NO: 27014 - RNA, 20 nt, Artificial Sequence
  targeting sequence with TTCN PAM
cuguugucucuucuucugga

SEQ ID NO: 27015 - RNA, 20 nt, Artificial Sequence
  targeting sequence with TTCN PAM
ucucuguugucucuucuucu

SEQ ID NO: 27016 - RNA, 20 nt, Artificial Sequence
  targeting sequence with TTCN PAM
aauguuucuucucuguuguc

SEQ ID NO: 27017 - RNA, 20 nt, Artificial Sequence
  targeting sequence with TTCN PAM
uggccauucaaauguuucuu

SEQ ID NO: 27018 - RNA, 20 nt, Artificial Sequence
  targeting sequence with TTCN PAM
guaaguucuuggccauucaa

SEQ ID NO: 27019 - RNA, 20 nt, Artificial Sequence
  targeting sequence with TTCN PAM
uauuguuacucuguaguuua

SEQ ID NO: 27020 - RNA, 20 nt, Artificial Sequence
  targeting sequence with TTCN PAM
gaguuucuuauuguuacucu

SEQ ID NO: 27021 - RNA, 20 nt, Artificial Sequence
  targeting sequence with TTCN PAM
aaagugcugggauuauaggc

SEQ ID NO: 27022 - RNA, 20 nt, Artificial Sequence
  targeting sequence with TTCN PAM
cggcugauuuuuuuguuuau

SEQ ID NO: 27023 - RNA, 20 nt, Artificial Sequence
  targeting sequence with TTCN PAM
caaguagcugggaccacagg

SEQ ID NO: 27024 - RNA, 20 nt, Artificial Sequence
  targeting sequence with TTCN PAM
agccuggaugacagggcaag

SEQ ID NO: 27025 - RNA, 20 nt, Artificial Sequence
  targeting sequence with TTCN PAM
uuuauuuuuugagacagggu

SEQ ID NO: 27026 - RNA, 20 nt, Artificial Sequence
  targeting sequence with TTCN PAM
caucacugcacuucaaccug

SEQ ID NO: 27027 - RNA, 20 nt, Artificial Sequence
  targeting sequence with TTCN PAM
accugggcaacagagugaga

SEQ ID NO: 27028 - RNA, 20 nt, Artificial Sequence
  targeting sequence with TTCN PAM
uuuuauuuuuuugagacaga

SEQ ID NO: 27029 - RNA, 20 nt, Artificial Sequence
  targeting sequence with TTCN PAM
uuuguuuuuucuuuuuauuu

SEQ ID NO: 27030 - RNA, 20 nt, Artificial Sequence
  targeting sequence with TTCN PAM
cccaacgccuuuuggcugcc

SEQ ID NO: 27031 - RNA, 20 nt, Artificial Sequence
  targeting sequence with TTCN PAM
cuuuugggcugggcauggug

SEQ ID NO: 27032 - RNA, 20 nt, Artificial Sequence
  targeting sequence with TTCN PAM
caggaggcugaggugggagg

SEQ ID NO: 27033 - RNA, 20 nt, Artificial Sequence
  targeting sequence with TTCN PAM
guggauccucccaccucagc

SEQ ID NO: 27034 - RNA, 20 nt, Artificial Sequence
  targeting sequence with TTCN PAM
auaaguagugugauaauagc

SEQ ID NO: 27035 - RNA, 20 nt, Artificial Sequence
  targeting sequence with TTCN PAM
cuucuauaaguagugugaua

SEQ ID NO: 27036 - RNA, 20 nt, Artificial Sequence
  targeting sequence with TTCN PAM
gauuuuaaaaacaucuccca

SEQ ID NO: 27037 - RNA, 20 nt, Artificial Sequence
  targeting sequence with TTCN PAM
ccuucacugcaggucauuug

SEQ ID NO: 27038 - RNA, 20 nt, Artificial Sequence
  targeting sequence with TTCN PAM
cugcaggucauuugaaaugg

SEQ ID NO: 27039 - RNA, 20 nt, Artificial Sequence
  targeting sequence with TTCN PAM
aaugaccugcagugaaggag

SEQ ID NO: 27040 - RNA, 20 nt, Artificial Sequence
  targeting sequence with TTCN PAM
aagguaacacauacuuuaug

SEQ ID NO: 27041 - RNA, 20 nt, Artificial Sequence
  targeting sequence with TTCN PAM
aaaccauuucaaaugaccug

SEQ ID NO: 27042 - RNA, 20 nt, Artificial Sequence
  targeting sequence with TTCN PAM
guguagcaaagcauaaagua

SEQ ID NO: 27043 - RNA, 20 nt, Artificial Sequence
  targeting sequence with TTCN PAM
acaguucuauucuuaaaguu

SEQ ID NO: 27044 - RNA, 20 nt, Artificial Sequence
  targeting sequence with TTCN PAM
auucuuaaaguuauuucuuu

SEQ ID NO: 27045 - RNA, 20 nt, Artificial Sequence
  targeting sequence with TTCN PAM
uaaaguuauuucuuucuugu

SEQ ID NO: 27046 - RNA, 20 nt, Artificial Sequence
  targeting sequence with TTCN PAM
uucuugugcuucuauuuuau

SEQ ID NO: 27047 - RNA, 20 nt, Artificial Sequence
  targeting sequence with TTCN PAM
ugugcuucuauuuuauaagg

SEQ ID NO: 27048 - RNA, 20 nt, Artificial Sequence
  targeting sequence with TTCN PAM
auuuuauaaggagcaacauu

SEQ ID NO: 27049 - RNA, 20 nt, Artificial Sequence
  targeting sequence with TTCN PAM
aaccaccuacuaagggaauu

SEQ ID NO: 27050 - RNA, 20 nt, Artificial Sequence
  targeting sequence with TTCN PAM
cuuaguaggugguuggaaaa

SEQ ID NO: 27051 - RNA, 20 nt, Artificial Sequence
  targeting sequence with TTCN PAM
cacucaaaacaaaucuuucu

SEQ ID NO: 27052 - RNA, 20 nt, Artificial Sequence
  targeting sequence with TTCN PAM
uguccuauagugagaauaaa

SEQ ID NO: 27053 - RNA, 20 nt, Artificial Sequence
  targeting sequence with TTCN PAM
ccuaacuccaagauuacgac

SEQ ID NO: 27054 - RNA, 20 nt, Artificial Sequence
  targeting sequence with TTCN PAM
aacuguccucaccuacacga

SEQ ID NO: 27055 - RNA, 20 nt, Artificial Sequence
  targeting sequence with TTCN PAM
uccuaccuaugaguuaaaaa

SEQ ID NO: 27056 - RNA, 20 nt, Artificial Sequence
  targeting sequence with TTCN PAM
ucauuuccuuuguuucaauu

SEQ ID NO: 27057 - RNA, 20 nt, Artificial Sequence
  targeting sequence with TTCN PAM
uuuccuuuguuucaauucua

SEQ ID NO: 27058 - RNA, 20 nt, Artificial Sequence
  targeting sequence with TTCN PAM
uuuguuucaauucuaccucu

SEQ ID NO: 27059 - RNA, 20 nt, Artificial Sequence
  targeting sequence with TTCN PAM
auucuaccucucaaagucca

SEQ ID NO: 27060 - RNA, 20 nt, Artificial Sequence
  targeting sequence with TTCN PAM
accucucaaaguccacucuu

SEQ ID NO: 27061 - RNA, 20 nt, Artificial Sequence
  targeting sequence with TTCN PAM
uaucuuaaaaugaccuuacu

SEQ ID NO: 27062 - RNA, 20 nt, Artificial Sequence
  targeting sequence with TTCN PAM
guguuugugagacuagcccg

SEQ ID NO: 27063 - RNA, 20 nt, Artificial Sequence
  targeting sequence with TTCN PAM
aguaucuccaugcuuucauc

SEQ ID NO: 27064 - RNA, 20 nt, Artificial Sequence
  targeting sequence with TTCN PAM
uccauguuauuuuucauacu

SEQ ID NO: 27065 - RNA, 20 nt, Artificial Sequence
  targeting sequence with TTCN PAM
uacuugcaaugauagccuuc

SEQ ID NO: 27066 - RNA, 20 nt, Artificial Sequence
  targeting sequence with TTCN PAM
ucuucaacauuacaaauaga

SEQ ID NO: 27067 - RNA, 20 nt, Artificial Sequence
  targeting sequence with TTCN PAM
ucaacauuacaaauagagaa

SEQ ID NO: 27068 - RNA, 20 nt, Artificial Sequence
  targeting sequence with TTCN PAM
acauuacaaauagagaacac

SEQ ID NO: 27069 - RNA, 20 nt, Artificial Sequence
  targeting sequence with TTCN PAM
cuauuuguaauguugaagaa

SEQ ID NO: 27070 - RNA, 20 nt, Artificial Sequence
  targeting sequence with TTCN PAM
acagucaccuauucucuucc

SEQ ID NO: 27071 - RNA, 20 nt, Artificial Sequence
  targeting sequence with TTCN PAM
cuuccuucuuuauauuucca

SEQ ID NO: 27072 - RNA, 20 nt, Artificial Sequence
  targeting sequence with TTCN PAM
uucuuuauauuuccauaaua

SEQ ID NO: 27073 - RNA, 20 nt, Artificial Sequence
  targeting sequence with TTCN PAM
uuauauuuccauaauacaaa

SEQ ID NO: 27074 - RNA, 20 nt, Artificial Sequence
  targeting sequence with TTCN PAM
auaauacaaaccauauggcc

SEQ ID NO: 27075 - RNA, 20 nt, Artificial Sequence
  targeting sequence with TTCN PAM
auagcuaguuuuccuguuuu

SEQ ID NO: 27076 - RNA, 20 nt, Artificial Sequence
  targeting sequence with TTCN PAM
uguuuuccucuuuccacacu

SEQ ID NO: 27077 - RNA, 20 nt, Artificial Sequence
  targeting sequence with TTCN PAM
ucuuuccacacuggcuucuu

SEQ ID NO: 27078 - RNA, 20 nt, Artificial Sequence
  targeting sequence with TTCN PAM
acacuggcuucuugaagugc

SEQ ID NO: 27079 - RNA, 20 nt, Artificial Sequence
  targeting sequence with TTCN PAM
ugaagugccauaucaaaucu

SEQ ID NO: 27080 - RNA, 20 nt, Artificial Sequence
  targeting sequence with TTCN PAM
agaagccaguguggaaagag

SEQ ID NO: 27081 - RNA, 20 nt, Artificial Sequence
  targeting sequence with TTCN PAM
uuaacaauaccauuaguauu

SEQ ID NO: 27082 - RNA, 20 nt, Artificial Sequence
  targeting sequence with TTCN PAM
auaaaugcuaauucagugau

SEQ ID NO: 27083 - RNA, 20 nt, Artificial Sequence
  targeting sequence with TTCN PAM
gugauagguuuaaaucuguc

SEQ ID NO: 27084 - RNA, 20 nt, Artificial Sequence
  targeting sequence with TTCN PAM
acccacaccagguuaggacu

SEQ ID NO: 27085 - RNA, 20 nt, Artificial Sequence
  targeting sequence with TTCN PAM
uuacucugguagaguuacau

SEQ ID NO: 27086 - RNA, 20 nt, Artificial Sequence
  targeting sequence with TTCN PAM
uucuuuacucugguagaguu

SEQ ID NO: 27087 - RNA, 20 nt, Artificial Sequence
  targeting sequence with TTCN PAM
guuauuugcuuggcuauaug

SEQ ID NO: 27088 - RNA, 20 nt, Artificial Sequence
  targeting sequence with TTCN PAM
guggcuucaguuauuugcuu

SEQ ID NO: 27089 - RNA, 20 nt, Artificial Sequence
  targeting sequence with TTCN PAM
caacacuucccaguucaucc

SEQ ID NO: 27090 - RNA, 20 nt, Artificial Sequence
  targeting sequence with TTCN PAM
caguucauccuaucugguga

SEQ ID NO: 27091 - RNA, 20 nt, Artificial Sequence
  targeting sequence with TTCN PAM
uccuaucuggugacugcauu

SEQ ID NO: 27092 - RNA, 20 nt, Artificial Sequence
  targeting sequence with TTCN PAM
agaaacugacuuuaaggcca

SEQ ID NO: 27093 - RNA, 20 nt, Artificial Sequence
  targeting sequence with TTCN PAM
ugaaaauaagccaaugcagu

SEQ ID NO: 27094 - RNA, 20 nt, Artificial Sequence
  targeting sequence with TTCN PAM
acuauggccuuaaagucagu

SEQ ID NO: 27095 - RNA, 20 nt, Artificial Sequence
  targeting sequence with TTCN PAM
ggucuuauuuuuuaaaaacu

SEQ ID NO: 27096 - RNA, 20 nt, Artificial Sequence
  targeting sequence with TTCN PAM
aaagaugacgacagaugaag

SEQ ID NO: 27097 - RNA, 20 nt, Artificial Sequence
  targeting sequence with TTCN PAM
ucugucgucaucuuuagaau

SEQ ID NO: 27098 - RNA, 20 nt, Artificial Sequence
  targeting sequence with TTCN PAM
agcguuuguaugccacaaac

SEQ ID NO: 27099 - RNA, 20 nt, Artificial Sequence
  targeting sequence with TTCN PAM
aacuucuagaagaguaacau

SEQ ID NO: 27100 - RNA, 20 nt, Artificial Sequence
  targeting sequence with TTCN PAM
agaagaguaacauauuuauu

SEQ ID NO: 27101 - RNA, 20 nt, Artificial Sequence
  targeting sequence with TTCN PAM
agaaguuagaagccucuguu

SEQ ID NO: 27102 - RNA, 20 nt, Artificial Sequence
  targeting sequence with TTCN PAM
uggcacguauuaggcacaca

SEQ ID NO: 27103 - RNA, 20 nt, Artificial Sequence
  targeting sequence with TTCN PAM
uguacaucaagauacuuccc

SEQ ID NO: 27104 - RNA, 20 nt, Artificial Sequence
  targeting sequence with TTCN PAM
cauagauguucuaaaacauu

SEQ ID NO: 27105 - RNA, 20 nt, Artificial Sequence
  targeting sequence with TTCN PAM
aaaacauuuaaaauauuaau

SEQ ID NO: 27106 - RNA, 20 nt, Artificial Sequence
  targeting sequence with TTCN PAM
aaggaaaucccuguguuaca

SEQ ID NO: 27107 - RNA, 20 nt, Artificial Sequence
  targeting sequence with TTCN PAM
uuagaaugugagccuuaaau

SEQ ID NO: 27108 - RNA, 20 nt, Artificial Sequence
  targeting sequence with TTCN PAM
uguaacacagggauuuccuu

SEQ ID NO: 27109 - RNA, 20 nt, Artificial Sequence
  targeting sequence with TTCN PAM
ccccucugccugccuguuuu

SEQ ID NO: 27110 - RNA, 20 nt, Artificial Sequence
  targeting sequence with TTCN PAM
ugcuuguaugguuuuucccc

SEQ ID NO: 27111 - RNA, 20 nt, Artificial Sequence
  targeting sequence with TTCN PAM
uuccugcuuguaugguuuuu

SEQ ID NO: 27112 - RNA, 20 nt, Artificial Sequence
  targeting sequence with TTCN PAM
aaauucuuuccugcuuguau

SEQ ID NO: 27113 - RNA, 20 nt, Artificial Sequence
  targeting sequence with TTCN PAM
aaacaauuuacucuuccuuu

SEQ ID NO: 27114 - RNA, 20 nt, Artificial Sequence
  targeting sequence with TTCN PAM
uuuucuggcuaugaaaauuc

SEQ ID NO: 27115 - RNA, 20 nt, Artificial Sequence
  targeting sequence with TTCN PAM
ggcuaugaaaauucgcauac

SEQ ID NO: 27116 - RNA, 20 nt, Artificial Sequence
  targeting sequence with TTCN PAM
uagccagaaaaggaagagua

SEQ ID NO: 27117 - RNA, 20 nt, Artificial Sequence
  targeting sequence with TTCN PAM
cauacuauuguuuaccaaua

SEQ ID NO: 27118 - RNA, 20 nt, Artificial Sequence
  targeting sequence with TTCN PAM
acccaaauuucaugacccaa

SEQ ID NO: 27119 - RNA, 20 nt, Artificial Sequence
  targeting sequence with TTCN PAM
ugacccaacaguuuggaaaa

SEQ ID NO: 27120 - RNA, 20 nt, Artificial Sequence
  targeting sequence with TTCN PAM
aaacuguugggucaugaaau

SEQ ID NO: 27121 - RNA, 20 nt, Artificial Sequence
  targeting sequence with TTCN PAM
uuuuuuccaaacuguugggu

SEQ ID NO: 27122 - RNA, 20 nt, Artificial Sequence
  targeting sequence with TTCN PAM
uggcagaaaaaaauuaucug

SEQ ID NO: 27123 - RNA, 20 nt, Artificial Sequence
  targeting sequence with TTCN PAM
gccaggaauaauguucauuu

SEQ ID NO: 27124 - RNA, 20 nt, Artificial Sequence
  targeting sequence with TTCN PAM
cagauggcucugcaugugau

SEQ ID NO: 27125 - RNA, 20 nt, Artificial Sequence
  targeting sequence with TTCN PAM
uuuuuugcuuagacauuuau

SEQ ID NO: 27126 - RNA, 20 nt, Artificial Sequence
  targeting sequence with TTCN PAM
aguauuguuucuuuuuuugc

SEQ ID NO: 27127 - RNA, 20 nt, Artificial Sequence
  targeting sequence with TTCN PAM
ugaggagucuuuaucaaauu

SEQ ID NO: 27128 - RNA, 20 nt, Artificial Sequence
  targeting sequence with TTCN PAM
ccauguuggccaggcugguc

SEQ ID NO: 27129 - RNA, 20 nt, Artificial Sequence
  targeting sequence with TTCN PAM
aaagugcuaggauuacaggc

SEQ ID NO: 27130 - RNA, 20 nt, Artificial Sequence
  targeting sequence with TTCN PAM
auggaaccuuucaucaaagg

SEQ ID NO: 27131 - RNA, 20 nt, Artificial Sequence
  targeting sequence with TTCN PAM
auugaaacagcuaggcuggg

SEQ ID NO: 27132 - RNA, 20 nt, Artificial Sequence
  targeting sequence with TTCN PAM
ucaaaggaucucaaaacaaa

SEQ ID NO: 27133 - RNA, 20 nt, Artificial Sequence
  targeting sequence with TTCN PAM
guagccauagggucaccaau

SEQ ID NO: 27134 - RNA, 20 nt, Artificial Sequence
  targeting sequence with TTCN PAM
uucuguagccauagggucac

SEQ ID NO: 27135 - RNA, 20 nt, Artificial Sequence
  targeting sequence with TTCN PAM
uuaggucauugauauauuuc

SEQ ID NO: 27136 - RNA, 20 nt, Artificial Sequence
  targeting sequence with TTCN PAM
auacugauauucugaaaccc

SEQ ID NO: 27137 - RNA, 20 nt, Artificial Sequence
  targeting sequence with TTCN PAM
gaaacccagcccucuguucu

SEQ ID NO: 27138 - RNA, 20 nt, Artificial Sequence
  targeting sequence with TTCN PAM
gaauaucaguauugaauucc

SEQ ID NO: 27139 - RNA, 20 nt, Artificial Sequence
  targeting sequence with TTCN PAM
aaaaacaaaaucuaguuuua

SEQ ID NO: 27140 - RNA, 20 nt, Artificial Sequence
  targeting sequence with TTCN PAM
uauagcacacuacuauacau

SEQ ID NO: 27141 - RNA, 20 nt, Artificial Sequence
  targeting sequence with TTCN PAM
uggcagagcuccuaaaaccc

SEQ ID NO: 27142 - RNA, 20 nt, Artificial Sequence
  targeting sequence with TTCN PAM
ucaauaacagaagcgcuuuu

SEQ ID NO: 27143 - RNA, 20 nt, Artificial Sequence
  targeting sequence with TTCN PAM
guuauugaggaaaaccuaag

SEQ ID NO: 27144 - RNA, 20 nt, Artificial Sequence
  targeting sequence with TTCN PAM
uaauguauuccuuucaacca

SEQ ID NO: 27145 - RNA, 20 nt, Artificial Sequence
  targeting sequence with TTCN PAM
uuucaaccacaccugaguuu

SEQ ID NO: 27146 - RNA, 20 nt, Artificial Sequence
  targeting sequence with TTCN PAM
accacaccugaguuuauacu

SEQ ID NO: 27147 - RNA, 20 nt, Artificial Sequence
  targeting sequence with TTCN PAM
ggauagggcugguugccagg

SEQ ID NO: 27148 - RNA, 20 nt, Artificial Sequence
  targeting sequence with TTCN PAM
ccuggcaaccagcccuaucc

SEQ ID NO: 27149 - RNA, 20 nt, Artificial Sequence
  targeting sequence with TTCN PAM
aauacucuaaucgcuugguu

SEQ ID NO: 27150 - RNA, 20 nt, Artificial Sequence
  targeting sequence with TTCN PAM
ccaaagguugaggaguggag

SEQ ID NO: 27151 - RNA, 20 nt, Artificial Sequence
  targeting sequence with TTCN PAM
ucucucuuccccaaagguug

SEQ ID NO: 27152 - RNA, 20 nt, Artificial Sequence
  targeting sequence with TTCN PAM
aaaccccaucauuuagucag

SEQ ID NO: 27153 - RNA, 20 nt, Artificial Sequence
  targeting sequence with TTCN PAM
cagguagugaauacauggag

SEQ ID NO: 27154 - RNA, 20 nt, Artificial Sequence
  targeting sequence with TTCN PAM
cuaccugggaaucuuuccaa

SEQ ID NO: 27155 - RNA, 20 nt, Artificial Sequence
  targeting sequence with TTCN PAM
uguccucucugggcacaaaa

SEQ ID NO: 27156 - RNA, 20 nt, Artificial Sequence
  targeting sequence with TTCN PAM
uuuagcuguuccugaguugu

SEQ ID NO: 27157 - RNA, 20 nt, Artificial Sequence
  targeting sequence with TTCN PAM
ugaguuguacccuuuauaau

SEQ ID NO: 27158 - RNA, 20 nt, Artificial Sequence
  targeting sequence with TTCN PAM
ugaguucuaugagucuuucc

SEQ ID NO: 27159 - RNA, 20 nt, Artificial Sequence
  targeting sequence with TTCN PAM
augagucuuuccagugaauu

SEQ ID NO: 27160 - RNA, 20 nt, Artificial Sequence
  targeting sequence with TTCN PAM
agugaauuaacgaaccugag

SEQ ID NO: 27161 - RNA, 20 nt, Artificial Sequence
  targeting sequence with TTCN PAM
cuggaaagacucauagaacu

SEQ ID NO: 27162 - RNA, 20 nt, Artificial Sequence
  targeting sequence with TTCN PAM
uuaauucacuggaaagacuc

SEQ ID NO: 27163 - RNA, 20 nt, Artificial Sequence
  targeting sequence with TTCN PAM
ucagguucguuaauucacug

SEQ ID NO: 27164 - RNA, 20 nt, Artificial Sequence
  targeting sequence with TTCN PAM
cgugaccccuuccucagguu

SEQ ID NO: 27165 - RNA, 20 nt, Artificial Sequence
  targeting sequence with TTCN PAM
gggguucucgugaccccuuc

SEQ ID NO: 27166 - RNA, 20 nt, Artificial Sequence
  targeting sequence with TTCN PAM
gucuggcuuggcugcaaauu

SEQ ID NO: 27167 - RNA, 20 nt, Artificial Sequence
  targeting sequence with TTCN PAM
gacacugucuaccuggaguu

SEQ ID NO: 27168 - RNA, 20 nt, Artificial Sequence
  targeting sequence with TTCN PAM
auucugacacugucuaccug

SEQ ID NO: 27169 - RNA, 20 nt, Artificial Sequence
  targeting sequence with TTCN PAM
auucaauucugacacugucu

SEQ ID NO: 27170 - RNA, 20 nt, Artificial Sequence
  targeting sequence with TTCN PAM
acaauuccauucaauucuga

SEQ ID NO: 27171 - RNA, 20 nt, Artificial Sequence
  targeting sequence with TTCN PAM
augacacugaguguucaaca

SEQ ID NO: 27172 - RNA, 20 nt, Artificial Sequence
  targeting sequence with TTCN PAM
guucuaugacacugaguguu

SEQ ID NO: 27173 - RNA, 20 nt, Artificial Sequence
  targeting sequence with TTCN PAM
ccuucaguucuaugacacug

SEQ ID NO: 27174 - RNA, 20 nt, Artificial Sequence
  targeting sequence with TTCN PAM
auaccacaccuaauucaccu

SEQ ID NO: 27175 - RNA, 20 nt, Artificial Sequence
  targeting sequence with TTCN PAM
ugggauauauuuguaaagcu

SEQ ID NO: 27176 - RNA, 20 nt, Artificial Sequence
  targeting sequence with TTCN PAM
auuuguacaugugcaucaag

SEQ ID NO: 27177 - RNA, 20 nt, Artificial Sequence
  targeting sequence with TTCN PAM
ugacagcauugcuuacauuu

SEQ ID NO: 27178 - RNA, 20 nt, Artificial Sequence
  targeting sequence with TTCN PAM
cucuuuuagcccaggcugga

SEQ ID NO: 27179 - RNA, 20 nt, Artificial Sequence
  targeting sequence with TTCN PAM
agugauucuccugccucagc

SEQ ID NO: 27180 - RNA, 20 nt, Artificial Sequence
  targeting sequence with TTCN PAM
ccugccucagccucccaagu

SEQ ID NO: 27181 - RNA, 20 nt, Artificial Sequence
  targeting sequence with TTCN PAM
cgacauucgccaggcugguc

SEQ ID NO: 27182 - RNA, 20 nt, Artificial Sequence
  targeting sequence with TTCN PAM
ccaggcuggucuugaacucc

SEQ ID NO: 27183 - RNA, 20 nt, Artificial Sequence
  targeting sequence with TTCN PAM
agaccagccuggcgaauguc

SEQ ID NO: 27184 - RNA, 20 nt, Artificial Sequence
  targeting sequence with TTCN PAM
guuacuucuccugcaaacuu

SEQ ID NO: 27185 - RNA, 20 nt, Artificial Sequence
  targeting sequence with TTCN PAM
ccugcaaacuuguuucucuu

SEQ ID NO: 27186 - RNA, 20 nt, Artificial Sequence
  targeting sequence with TTCN PAM
cuuucuuucagucuucucca

SEQ ID NO: 27187 - RNA, 20 nt, Artificial Sequence
  targeting sequence with TTCN PAM
uucagucuucuccaucucaa

SEQ ID NO: 27188 - RNA, 20 nt, Artificial Sequence
  targeting sequence with TTCN PAM
gucuucuccaucucaauaaa

SEQ ID NO: 27189 - RNA, 20 nt, Artificial Sequence
  targeting sequence with TTCN PAM
ccaucucaauaaaugacaac

SEQ ID NO: 27190 - RNA, 20 nt, Artificial Sequence
  targeting sequence with TTCN PAM
uccagaaacucaauacaaaa

SEQ ID NO: 27191 - RNA, 20 nt, Artificial Sequence
  targeting sequence with TTCN PAM
agaaacucaauacaaaaacc

SEQ ID NO: 27192 - RNA, 20 nt, Artificial Sequence
  targeting sequence with TTCN PAM
ggaagaaugcaguugucauu

SEQ ID NO: 27193 - RNA, 20 nt, Artificial Sequence
  targeting sequence with TTCN PAM
uuucuuucacagcacauauc

SEQ ID NO: 27194 - RNA, 20 nt, Artificial Sequence
  targeting sequence with TTCN PAM
uucacagcacauauccaauc

SEQ ID NO: 27195 - RNA, 20 nt, Artificial Sequence
  targeting sequence with TTCN PAM
cagcacauauccaaucuauc

SEQ ID NO: 27196 - RNA, 20 nt, Artificial Sequence
  targeting sequence with TTCN PAM
aguagagucagcagguuuug

SEQ ID NO: 27197 - RNA, 20 nt, Artificial Sequence
  targeting sequence with TTCN PAM
ggauauauuuuucaaguaga

SEQ ID NO: 27198 - RNA, 20 nt, Artificial Sequence
  targeting sequence with TTCN PAM
cucaccuugauuacaguaau

SEQ ID NO: 27199 - RNA, 20 nt, Artificial Sequence
  targeting sequence with TTCN PAM
gcuuuuguccuugcccaauc

SEQ ID NO: 27200 - RNA, 20 nt, Artificial Sequence
  targeting sequence with TTCN PAM
uuggcugcugaguagauagu

SEQ ID NO: 27201 - RNA, 20 nt, Artificial Sequence
  targeting sequence with TTCN PAM
uuucuuuggcugcugaguag

SEQ ID NO: 27202 - RNA, 20 nt, Artificial Sequence
  targeting sequence with TTCN PAM
uauuuugcucaguguaaaug

SEQ ID NO: 27203 - RNA, 20 nt, Artificial Sequence
  targeting sequence with TTCN PAM
gcauuuacacugagcaaaau

SEQ ID NO: 27204 - RNA, 20 nt, Artificial Sequence
  targeting sequence with TTCN PAM
aauaagcucccaggugcugc

SEQ ID NO: 27205 - RNA, 20 nt, Artificial Sequence
  targeting sequence with TTCN PAM
uaggucugggguagggccua

SEQ ID NO: 27206 - RNA, 20 nt, Artificial Sequence
  targeting sequence with TTCN PAM
auuaaaauuuagacucuaau

SEQ ID NO: 27207 - RNA, 20 nt, Artificial Sequence
  targeting sequence with TTCN PAM
ugugcacauugaaguuugaa

SEQ ID NO: 27208 - RNA, 20 nt, Artificial Sequence
  targeting sequence with TTCN PAM
augugcacaugaauuaccuu

SEQ ID NO: 27209 - RNA, 20 nt, Artificial Sequence
  targeting sequence with TTCN PAM
aacuucaaugugcacaugaa

SEQ ID NO: 27210 - RNA, 20 nt, Artificial Sequence
  targeting sequence with TTCN PAM
auaaagcaccacaaaauaag

SEQ ID NO: 27211 - RNA, 20 nt, Artificial Sequence
  targeting sequence with TTCN PAM
ucaggcaagcuucugucuca

SEQ ID NO: 27212 - RNA, 20 nt, Artificial Sequence
  targeting sequence with TTCN PAM
gucucaggacauguacacug

SEQ ID NO: 27213 - RNA, 20 nt, Artificial Sequence
  targeting sequence with TTCN PAM
cuaugccuagaaugcucuuc

SEQ ID NO: 27214 - RNA, 20 nt, Artificial Sequence
  targeting sequence with TTCN PAM
aggcauagugaaucacagug

SEQ ID NO: 27215 - RNA, 20 nt, Artificial Sequence
  targeting sequence with TTCN PAM
cauauauguguauggcucac

SEQ ID NO: 27216 - RNA, 20 nt, Artificial Sequence
  targeting sequence with TTCN PAM
cuucuuucaagcccuuacuc

SEQ ID NO: 27217 - RNA, 20 nt, Artificial Sequence
  targeting sequence with TTCN PAM
uucaagcccuuacucaaaug

SEQ ID NO: 27218 - RNA, 20 nt, Artificial Sequence
  targeting sequence with TTCN PAM
agacguuugauauaggcugg

SEQ ID NO: 27219 - RNA, 20 nt, Artificial Sequence
  targeting sequence with TTCN PAM
ucaguacaggaaguaaauua

SEQ ID NO: 27220 - RNA, 20 nt, Artificial Sequence
  targeting sequence with TTCN PAM
uguacugaugaauuugccug

SEQ ID NO: 27221 - RNA, 20 nt, Artificial Sequence
  targeting sequence with TTCN PAM
ccccugcaguccuugguaac

SEQ ID NO: 27222 - RNA, 20 nt, Artificial Sequence
  targeting sequence with TTCN PAM
cccuuccccccugcaguccu

SEQ ID NO: 27223 - RNA, 20 nt, Artificial Sequence
  targeting sequence with TTCN PAM
gaguuuuuguuuggggugau

SEQ ID NO: 27224 - RNA, 20 nt, Artificial Sequence
  targeting sequence with TTCN PAM
ucaccccaaacaaaaacucu

SEQ ID NO: 27225 - RNA, 20 nt, Artificial Sequence
  targeting sequence with TTCN PAM
auaauguuucaucaccccaa

SEQ ID NO: 27226 - RNA, 20 nt, Artificial Sequence
  targeting sequence with TTCN PAM
gcggcguuaaguacauccac

SEQ ID NO: 27227 - RNA, 20 nt, Artificial Sequence
  targeting sequence with TTCN PAM
auucagcggcguuaaguaca

SEQ ID NO: 27228 - RNA, 20 nt, Artificial Sequence
  targeting sequence with TTCN PAM
ugguguuuugaacaaagaau

SEQ ID NO: 27229 - RNA, 20 nt, Artificial Sequence
  targeting sequence with TTCN PAM
aaacaccaagaaccuggaca

SEQ ID NO: 27230 - RNA, 20 nt, Artificial Sequence
  targeting sequence with TTCN PAM
uuguucaaaacaccaagaac

SEQ ID NO: 27231 - RNA, 20 nt, Artificial Sequence
  targeting sequence with TTCN PAM
auucuuuguucaaaacacca

SEQ ID NO: 27232 - RNA, 20 nt, Artificial Sequence
  targeting sequence with TTCN PAM
cugcuuugcugggcguuuug

SEQ ID NO: 27233 - RNA, 20 nt, Artificial Sequence
  targeting sequence with TTCN PAM
uuuucucugcuuugcugggc

SEQ ID NO: 27234 - RNA, 20 nt, Artificial Sequence
  targeting sequence with TTCN PAM
uuuguugcuucauuuucucu

SEQ ID NO: 27235 - RNA, 20 nt, Artificial Sequence
  targeting sequence with TTCN PAM
auaaaucccugcuuuuguuc

SEQ ID NO: 27236 - RNA, 20 nt, Artificial Sequence
  targeting sequence with TTCN PAM
uuuucaauaaaucccugcuu

SEQ ID NO: 27237 - RNA, 20 nt, Artificial Sequence
  targeting sequence with TTCN PAM
guauggcuggcccuugagcc

SEQ ID NO: 27238 - RNA, 20 nt, Artificial Sequence
  targeting sequence with TTCN PAM
ugggucaaaauacccucuag

SEQ ID NO: 27239 - RNA, 20 nt, Artificial Sequence
  targeting sequence with TTCN PAM
agaggguauuuugacccaag

SEQ ID NO: 27240 - RNA, 20 nt, Artificial Sequence
  targeting sequence with TTCN PAM
cacugggcacuucaugcuua

SEQ ID NO: 27241 - RNA, 20 nt, Artificial Sequence
  targeting sequence with TTCN PAM
ugcuuaccucauguaaauga

SEQ ID NO: 27242 - RNA, 20 nt, Artificial Sequence
  targeting sequence with TTCN PAM
uuuacaugagguaagcauga

SEQ ID NO: 27243 - RNA, 20 nt, Artificial Sequence
  targeting sequence with TTCN PAM
cccuagccucugauugguug

SEQ ID NO: 27244 - RNA, 20 nt, Artificial Sequence
  targeting sequence with TTCN PAM
augcaaaagaagacucagcu

SEQ ID NO: 27245 - RNA, 20 nt, Artificial Sequence
  targeting sequence with TTCN PAM
uuugcauagaaguauaacuu

SEQ ID NO: 27246 - RNA, 20 nt, Artificial Sequence
  targeting sequence with TTCN PAM
gaggcuggagugaaguuaca

SEQ ID NO: 27247 - RNA, 20 nt, Artificial Sequence
  targeting sequence with TTCN PAM
cuccagccucugaaugguug

SEQ ID NO: 27248 - RNA, 20 nt, Artificial Sequence
  targeting sequence with TTCN PAM
caacuuuguaacuucacucc

SEQ ID NO: 27249 - RNA, 20 nt, Artificial Sequence
  targeting sequence with TTCN PAM
uucgcaacuuuguaacuuca

SEQ ID NO: 27250 - RNA, 20 nt, Artificial Sequence
  targeting sequence with TTCN PAM
caucugcuguccagaaaagg

SEQ ID NO: 27251 - RNA, 20 nt, Artificial Sequence
  targeting sequence with TTCN PAM
ggacagcagaugggaaauug

SEQ ID NO: 27252 - RNA, 20 nt, Artificial Sequence
  targeting sequence with TTCN PAM
augccuaaguaaaaaacgac

SEQ ID NO: 27253 - RNA, 20 nt, Artificial Sequence
  targeting sequence with TTCN PAM
uuucaaguuaguucaaggaa

SEQ ID NO: 27254 - RNA, 20 nt, Artificial Sequence
  targeting sequence with TTCN PAM
aguuaguucaaggaagucgg

SEQ ID NO: 27255 - RNA, 20 nt, Artificial Sequence
  targeting sequence with TTCN PAM
aggaagucggagugaggcau

SEQ ID NO: 27256 - RNA, 20 nt, Artificial Sequence
  targeting sequence with TTCN PAM
uugaacuaacuugaaaggaa

SEQ ID NO: 27257 - RNA, 20 nt, Artificial Sequence
  targeting sequence with TTCN PAM
cugccugcagacucuauucu

SEQ ID NO: 27258 - RNA, 20 nt, Artificial Sequence
  targeting sequence with TTCN PAM
ccugccuccuauguuuuacu

SEQ ID NO: 27259 - RNA, 20 nt, Artificial Sequence
  targeting sequence with TTCN PAM
uuuucuuucuuuuuuuuuuu

SEQ ID NO: 27260 - RNA, 20 nt, Artificial Sequence
  targeting sequence with TTCN PAM
uucuuuuuuuuuuuuuuuuu

SEQ ID NO: 27261 - RNA, 20 nt, Artificial Sequence
  targeting sequence with TTCN PAM
uuuuuuuuuuuuuuuuuuug

SEQ ID NO: 27262 - RNA, 20 nt, Artificial Sequence
  targeting sequence with TTCN PAM
gucuccaggcuggagugcag

SEQ ID NO: 27263 - RNA, 20 nt, Artificial Sequence
  targeting sequence with TTCN PAM
cagguucaagugauucuccu

SEQ ID NO: 27264 - RNA, 20 nt, Artificial Sequence
  targeting sequence with TTCN PAM
agugauucuccugccucagc

SEQ ID NO: 27265 - RNA, 20 nt, Artificial Sequence
  targeting sequence with TTCN PAM
ccugccucagccucccgagu

SEQ ID NO: 27266 - RNA, 20 nt, Artificial Sequence
  targeting sequence with TTCN PAM
ucugggccucacucaccgga

SEQ ID NO: 27267 - RNA, 20 nt, Artificial Sequence
  targeting sequence with TTCN PAM
cagcagagggagcagccaug

SEQ ID NO: 27268 - RNA, 20 nt, Artificial Sequence
  targeting sequence with TTCN PAM
ccucccaauauccacacagu

SEQ ID NO: 27269 - RNA, 20 nt, Artificial Sequence
  targeting sequence with TTCN PAM
ggccuuugcucaaugucccu

SEQ ID NO: 27270 - RNA, 20 nt, Artificial Sequence
  targeting sequence with TTCN PAM
cuggccaccuauugaaaccc

SEQ ID NO: 27271 - RNA, 20 nt, Artificial Sequence
  targeting sequence with TTCN PAM
auagguggccagggaaggcc

SEQ ID NO: 27272 - RNA, 20 nt, Artificial Sequence
  targeting sequence with TTCN PAM
cuggcugcccucagcuacgu

SEQ ID NO: 27273 - RNA, 20 nt, Artificial Sequence
  targeting sequence with TTCN PAM
cguaauuugagcuuuaggaa

SEQ ID NO: 27274 - RNA, 20 nt, Artificial Sequence
  targeting sequence with TTCN PAM
uaaagcucaaauuacgugaa

SEQ ID NO: 27275 - RNA, 19 nt, Artificial Sequence
  targeting sequence
aaguggcugcguaccacac

SEQ ID NO: 27276 - RNA, 18 nt, Artificial Sequence
  targeting sequence
aaguggcugcguaccaca

SEQ ID NO: 27277 - RNA, 17 nt, Artificial Sequence
  targeting sequence
aaguggcugcguaccac

SEQ ID NO: 27278 - RNA, 16 nt, Artificial Sequence
  targeting sequence
aaguggcugcguacca

SEQ ID NO: 27279 - RNA, 15 nt, Artificial Sequence
  targeting sequence
aaguggcugcguacc

SEQ ID NO: 27280 - protein, 44 aa, Mus musculus
MNGTEGPNFYVPFSNVTGVVRSPFEQPQYYLAEPWQFSMLAAYM

SEQ ID NO: 27281 - DNA, 39 bp, Mus musculus
ttctccaacgtcacaggcgtggtgcggagccccttcgag

SEQ ID NO: 27282 - DNA, 34 bp, Artificial Sequence
  mRHO target sequence
ttctccaacgtcacaggtgcggagccccttcgag

SEQ ID NO: 27283 - DNA, 34 bp, Artificial Sequence
  mRHO target sequence
ttctccaacgtcacaggcgcggagccccttcgag

SEQ ID NO: 27284 - DNA, 35 bp, Artificial Sequence
  mRHO target sequence
ttctccaacgtcacgtggtgcggagccccttcgag

SEQ ID NO: 27285 - DNA, 35 bp, Artificial Sequence
  mRHO target sequence
ttctccaacgtcacagggtgcggagccccttcgag

SEQ ID NO: 27286 - DNA, 35 bp, Artificial Sequence
  mRHO target sequence
ttctccaacgtcacatggtgcggagccccttcgag

SEQ ID NO: 27287 - DNA, 34 bp, Artificial Sequence
  mRHO target sequence
ttctccaacgtcactggtgcggagccccttcgag

SEQ ID NO: 27288 - DNA, 36 bp, Artificial Sequence
  mRHO target sequence
ttctccaacgtcacagtggtgcggagccccttcgag

SEQ ID NO: 27289 - DNA, 28 bp, Artificial Sequence
  mRHO target sequence
ttctccaacggtgcggagccccttcgag

SEQ ID NO: 27290 - DNA, 33 bp, Artificial Sequence
  mRHO target sequence
ttctccaacgtcacagtgcggagccccttcgag

SEQ ID NO: 27291 - DNA, 37 bp, Artificial Sequence
  mRHO target sequence
ttctccaacgtcacaggtggtgcggagccccttcgag

SEQ ID NO: 27292 - DNA, 36 bp, Artificial Sequence
  mRHO target sequence
ttctccaacgtcacaggcgtgcggagccccttcgag

SEQ ID NO: 27293 - DNA, 37 bp, Artificial Sequence
  mRHO target sequence
ttctccaacgtcacaggcggtgcggagccccttcgag

SEQ ID NO: 27294 - DNA, 30 bp, Artificial Sequence
  mRHO target sequence
ttctccaacgtggtgcggagccccttcgag

SEQ ID NO: 27295 - DNA, 26 bp, Artificial Sequence
  mRHO target sequence
ttctccaggtgcggagccccttcgag

SEQ ID NO: 27296 - DNA, 32 bp, Artificial Sequence
  mRHO target sequence
ttctccaacgtcaggtgcggagccccttcgag

SEQ ID NO: 27297 - DNA, 33 bp, Artificial Sequence
  mRHO target sequence
ttctccaacgtcacggtgcggagccccttcgag

SEQ ID NO: 27298 - DNA, 35 bp, Artificial Sequence
  mRHO target sequence
ttctccaacgtcgcgtggtgcggagccccttcgag

SEQ ID NO: 27299 - DNA, 27 bp, Artificial Sequence
  mRHO target sequence
ttctccatggtgcggagccccttcgag

SEQ ID NO: 27300 - DNA, 27 bp, Artificial Sequence
  mRHO target sequence
ttctccaacgtgcggagccccttcgag
